United States Patent Application Publication US 2004/0029133 A1 - sequence listing, part 4

SEQ ID NO: 558 - DNA, 16570 bp, Homo sapiens mitochondrial
  3108: "n" refers to a nucleotide at position 3107 of the Cambridge Reference Sequence (CRS, Anderson et al. 1981 Nature 290:457-465), later determined to be absent from the human mtDNA sequence according to the revised CRS (rCRS, Andrews et al. 1999 Nature Genetics 23:147); "n" therefore represents a single nucleotide deletion at a position corresponding to nucleotide 3107 of SEQ ID NO:1 as provided herein.
gatcacaggtctatcaccctattaaccactcacgggagctctccatgcatttggtattttcgtctggggggtatgcacgcgatagcattgcgagacgctggagccggagcaccctatgtcgcagtatctgtctttgattcctgccccatcccattatttatcgcacctacgttcaatattacaggcgaacatacttactaaagtgtgttaattaattaatgcttgtaggacataataataacaattgaatgtctgcacagccgctttccacacagacatcataacaaaaaatttccaccaaaccccccctcccccgccttctggccacagcacttaaacacatctctgccaaaccccaaaaacaaagaaccctaacaccagcctaaccagatttcaaattttatcttttggcggtatgcacttttaacagtcaccccccaactaacacattattttcccctcccactcccatactactaatctcatcaatacaacccccgcccatcctacccagcacacacacaccgctgctaaccccataccccgaaccaaccaaaccccaaagacaccccccacagtttatgtagcttacctcctcaaagcaatacactgaaaatgtttagacgggctcacatcaccccataaacaaataggtttggtcctagcctttctattagctcttagtaagattacacatgcaagcatccccgttccagtgagttcaccctctaaatcaccacgatcaaaagggacaagcatcaagcacgcagcaatgcagctcaaaacgcttagcctagccacacccccacgggaaacagcagtgattaacctttagcaataaacgaaagtttaactaagctatactaaccccagggttggtcaatttcgtgccagccaccgcggtcacacgattaacccaagtcaatagaagccggcgtaaagagtgttttagatcaccccctccccaataaagctaaaactcacctgagttgtaaaaaactccagttgacacaaaatagactacgaaagtggctttaacatatctgaacacacaatagctaagacccaaactgggattagataccccactatgcttagccctaaacctcaacagttaaatcaacaaaactgctcgccagaacactacgagccacagcttaaaactcaaaggacctggcggtgcttcatatccctctagaggagcctgttctgtaatcgataaaccccgatcaacctcaccacctcttgctcagcctatataccgccatcttcagcaaaccctgatgaaggctacaaagtaagcgcaagtacccacgtaaagacgttaggtcaaggtgtagcccatgaggtggcaagaaatgggctacattttctaccccagaaaactacgatagcccttatgaaacttaagggtcgaaggtggatttagcagtaaactgagagtagagtgcttagttgaacagggccctgaagcgcgtacacaccgcccgtcaccctcctcaagtatacttcaaaggacatttaactaaaacccctacgcatttatatagaggagacaagtcgtaacatggtaagtgtactggaaagtgcacttggacgaaccagagtgtagcttaacacaaagcacccaacttacacttaggagatttcaacttaacttgaccgctctgagctaaacctagccccaaacccactccaccttactaccagacaaccttagccaaaccatttacccaaataaagtataggcgatagaaattgaaacctggcgcaatagatatagtaccgcaagggaaagatgaaaaattataaccaagcataatatagcaaggactaacccctataccttctgcataatgaattaactagaaataactttgcaaggagagccaaagctaagacccccgaaaccagacgagctacctaagaacagctaaaagagcacacccgtctatgtagcaaaatagtgggaagatttataggtagaggcgacaaacctaccgagcctggtgatagctggttgtccaagatagaatcttagttcaactttaaatttgcccacagaaccctctaaatccccttgtaaatttaactgttagtccaaagaggaacagctctttggacactaggaaaaaaccttgtagagagagtaaaaaatttaacacccatagtaggcctaaaagcagccaccaattaagaaagcgttcaagctcaacacccactacctaaaaaatcccaaacatataactgaactcctcacacccaattggaccaatctatcaccctatagaagaactaatgttagtataagtaacatgaaaacattctcctccgcataagcctgcgtcagattaaaacactgaactgacaattaacagcccaatatctacaatcaaccaacaagtcattattaccctcactgtcaacccaacacaggcatgctcataaggaaaggttaaaaaaagtaaaaggaactcggcaaatcttaccccgcctgtttaccaaaaacatcacctctagcatcaccagtattagaggcaccgcctgcccagtgacacatgtttaacggccgcggtaccctaaccgtgcaaaggtagcataatcacttgttccttaaatagggacctgtatgaatggctccacgagggttcagctgtctcttacttttaaccagtgaaattgacctgcccgtgaagaggcgggcataacacagcaagacgagaagaccctatggagctttaatttattaatgcaaacagtacctaacaaacccacaggtcctaaactaccaaacctgcattaaaaatttcggttggggcgacctcggagcagaacccaacctccgagcagtacatgctaagacttcaccagtcaaagcgaactactatactcaattgatccaataacttgaccaacggaacaagttaccctagggataacagcgcaatcctattctagagtccatatcaacaatagggtttacgacctcgatgttggatcaggacatcccgatggtgcagccgctattaaaggttcgtttgttcaacgattaaagtcctacgtgatctgagttcagaccggagtaatccaggtcggtttctatctacnttcaaattcctccctgtacgaaaggacaagagaaataaggcctacttcacaaagcgccttcccccgtaaatgatatcatctcaacttagtattatacccacacccacccaagaacagggtttgttaagatggcagagcccggtaatcgcataaaacttaaaactttacagtcagaggttcaattcctcttcttaacaacatacccatggccaacctcctactcctcattgtacccattctaatcgcaatggcattcctaatgcttaccgaacgaaaaattctaggctatatacaactacgcaaaggccccaacgttgtaggcccctacgggctactacaacccttcgctgacgccataaaactcttcaccaaagagcccctaaaacccgccacatctaccatcaccctctacatcaccgccccgaccttagctctcaccatcgctcttctactatgaacccccctccccatacccaaccccctggtcaacctcaacctaggcctcctatttattctagccacctctagcctagccgtttactcaatcctctgatcagggtgagcatcaaactcaaactacgccctgatcggcgcactgcgagcagtagcccaaacaatctcatatgaagtcaccctagccatcattctactatcaacattactaataagtggctcctttaacctctccacccttatcacaacacaagaacacctctgattactcctgccatcatgacccttggccataatatgatttatctccacactagcagagaccaaccgaacccccttcgaccttgccgaaggggagtccgaactagtctcaggcttcaacatcgaatacgccgcaggccccttcgccctattcttcatagccgaatacacaaacattattataataaacaccctcaccactacaatcttcctaggaacaacatatgacgcactctcccctgaactctacacaacatattttgtcaccaagaccctacttctaacctccctgttcttatgaattcgaacagcatacccccgattccgctacgaccaactcatacacctcctatgaaaaaacttcctaccactcaccctagcattacttatatgatatgtctccatacccattacaatctccagcattccccctcaaacctaagaaatatgtctgataaaagagttactttgatagagtaaataataggagcttaaacccccttatttctaggactatgagaatcgaacccatccctgagaatccaaaattctccgtgccacctatcacaccccatcctaaagtaaggtcagctaaataagctatcgggcccataccccgaaaatgttggttatacccttcccgtactaattaatcccctggcccaacccgtcatctactctaccatctttgcaggcacactcatcacagcgctaagctcgcactgattttttacctgagtaggcctagaaataaacatgctagcttttattccagttctaaccaaaaaaataaaccctcgttccacagaagctgccatcaagtatttcctcacgcaagcaaccgcatccataatccttctaatagctatcctcttcaacaatatactctccggacaatgaaccataaccaatactaccaatcaatactcatcattaataatcataatggctatagcaataaaactaggaatagccccctttcacttctgagtcccagaggttacccaaggcacccctctgacatccggcctgcttcttctcacatgacaaaaactagcccccatctcaatcatataccaaatctctccctcactaaacgtaagccttctcctcactctctcaatcttatccatcatagcaggcagttgaggtggattaaaccaaacccagctacgcaaaatcttagcatactcctcaattacccacataggatgaataatagcagttctaccgtacaaccctaacataaccattcttaatttaactatttatattatcctaactactaccgcattcctactactcaacttaaactccagcaccacgaccctactactatctcgcacctgaaacaagctaacatgactaacacccttaattccatccaccctcctctccctaggaggcctgcccccgctaaccggctttttgcccaaatgggccattatcgaagaattcacaaaaaacaatagcctcatcatccccaccatcatagccaccatcaccctccttaacctctacttctacctacgcctaatctactccacctcaatcacactactccccatatctaacaacgtaaaaataaaatgacagtttgaacatacaaaacccaccccattcctccccacactcatcgcccttaccacgctactcctacctatctccccttttatactaataatcttatagaaatttaggttaaatacagaccaagagccttcaaagccctcagtaagttgcaatacttaatttctgtaacagctaaggactgcaaaaccccactctgcatcaactgaacgcaaatcagccactttaattaagctaagcccttactagaccaatgggacttaaacccacaaacacttagttaacagctaagcaccctaatcaactggcttcaatctacttctcccgccgccgggaaaaaaggcgggagaagccccggcaggtttgaagctgcttcttcgaatttgcaattcaatatgaaaatcacctcggagctggtaaaaagaggcctaacccctgtctttagatttacagtccaatgcttcactcagccattttacctcacccccactgatgttcgccgaccgttgactattctctacaaaccacaaagacattggaacactatacctattattcggcgcatgagctggagtcctaggcacagctctaagcctccttattcgagccgagctgggccagccaggcaaccttctaggtaacgaccacatctacaacgttatcgtcacagcccatgcatttgtaataatcttcttcatagtaatacccatcataatcggaggctttggcaactgactagttcccctaataatcggtgcccccgatatggcgtttccccgcataaacaacataagcttctgactcttacctccctctctcctactcctgctcgcatctgctatagtggaggccggagcaggaacaggttgaacagtctaccctcccttagcagggaactactcccaccctggagcctccgtagacctaaccatcttctccttacacctagcaggtgtctcctctatcttaggggccatcaatttcatcacaacaattatcaatataaaaccccctgccataacccaataccaaacgcccctcttcgtctgatccgtcctaatcacagcagtcctacttctcctatctctcccagtcctagctgctggcatcactatactactaacagaccgcaacctcaacaccaccttcttcgaccccgccggaggaggagaccccattctataccaacacctattctgatttttcggtcaccctgaagtttatattcttatcctaccaggcttcggaataatctcccatattgtaacttactactccggaaaaaaagaaccatttggatacataggtatggtctgagctatgatatcaattggcttcctagggtttatcgtgtgagcacaccatatatttacagtaggaatagacgtagacacacgagcatatttcacctccgctaccataatcatcgctatccccaccggcgtcaaagtatttagctgactcgccacactccacggaagcaatatgaaatgatctgctgcagtgctctgagccctaggattcatctttcttttcaccgtaggtggcctgactggcattgtattagcaaactcatcactagacatcgtactacacgacacgtactacgttgtagcccacttccactatgtcctatcaataggagctgtatttgccatcataggaggcttcattcactgatttcccctattctcaggctacaccctagaccaaacctacgccaaaatccatttcactatcatattcatcggcgtaaatctaactttcttcccacaacactttctcggcctatccggaatgccccgacgttactcggactaccccgatgcatacaccacatgaaacatcctatcatctgtaggctcattcatttctctaacagcagtaatattaataattttcatgatttgagaagccttcgcttcgaagcgaaaagtcctaatagtagaagaaccctccataaacctggagtgactatatggatgccccccaccctaccacacattcgaagaacccgtatacataaaatctagacaaaaaaggaaggaatcgaaccccccaaagctggtttcaagccaaccccatggcctccatgactttttcaaaaaggtattagaaaaaccatttcataactttgtcaaagttaaattataggctaaatcctatatatcttaatggcacatgcagcgcaagtaggtctacaagacgctacttcccctatcatagaagagcttatcacctttcatgatcacgccctcataatcattttccttatctgcttcctagtcctgtatgcccttttcctaacactcacaacaaaactaactaatactaacatctcagacgctcaggaaatagaaaccgtctgaactatcctgcccgccatcatcctagtcctcatcgccctcccatccctacgcatcctttacataacagacgaggtcaacgatccctcccttaccatcaaatcaattggccaccaatggtactgaacctacgagtacaccgactacggcggactaatcttcaactcctacatacttcccccattattcctagaaccaggcgacctgcgactccttgacgttgacaatcgagtagtactcccgattgaagcccccattcgtataataattacatcacaagacgtcttgcactcatgagctgtccccacattaggcttaaaaacagatgcaattcccggacgtctaaaccaaaccactttcaccgctacacgaccgggggtatactacggtcaatgctctgaaatctgtggagcaaaccacagtttcatgcccatcgtcctagaattaattcccctaaaaatctttgaaatagggcccgtatttaccctatagcaccccctctaccccctctagagcccactgtaaagctaacttagcattaaccttttaagttaaagattaagagaaccaacacctctttacagtgaaatgccccaactaaatactaccgtatggcccaccataattacccccatactccttacactattcctcatcacccaactaaaaatattaaacacaaactaccacctacctccctcaccaaagcccataaaaataaaaaattataacaaaccctgagaaccaaaatgaacgaaaatctgttcgcttcattcattgcccccacaatcctaggcctacccgccgcagtactgatcattctatttccccctctattgatccccacctccaaatatctcatcaacaaccgactaatcaccacccaacaatgactaatcaaactaacctcaaaacaaatgataaccatacacaacactaaaggacgaacctgatctcttatactagtatccttaatcatttttattgccacaactaacctcctcggactcctgcctcactcatttacaccaaccacccaactatctataaacctagccatggccatccccttatgagcgggcgcagtgattataggctttcgctctaagattaaaaatgccctagcccacttcttaccacaaggcacacctacaccccttatccccatactagttattatcgaaaccatcagcctactcattcaaccaatagccctggccgtacgcctaaccgctaacattactgcaggccacctactcatgcacctaattggaagcgccaccctagcaatatcaaccattaaccttccctctacacttatcatcttcacaattctaattctactgactatcctagaaatcgctgtcgccttaatccaagcctacgttttcacacttctagtaagcctctacctgcacgacaacacataatgacccaccaatcacatgcctatcatatagtaaaacccagcccatgacccctaacaggggccctctcagccctcctaatgacctccggcctagccatgtgatttcacttccactccataacgctcctcatactaggcctactaaccaacacactaaccatataccaatgatggcgcgatgtaacacgagaaagcacataccaaggccaccacacaccacctgtccaaaaaggccttcgatacgggataatcctatttattacctcagaagtttttttcttcgcaggatttttctgagccttttaccactccagcctagcccctaccccccaattaggagggcactggcccccaacaggcatcaccccgctaaatcccctagaagtcccactcctaaacacatccgtattactcgcatcaggagtatcaatcacctgagctcaccatagtctaatagaaaacaaccgaaaccaaataattcaagcactgcttattacaattttactgggtctctattttaccctcctacaagcctcagagtacttcgagtctcccttcaccatttccgacggcatctacggctcaacattttttgtagccacaggcttccacggacttcacgtcattattggctcaactttcctcactatctgcttcatccgccaactaatatttcactttacatccaaacatcactttggcttcgaagccgccgcctgatactggcattttgtagatgtggtttgactatttctgtatgtctccatctattgatgagggtcttactcttttagtataaatagtaccgttaacttccaattaactagttttgacaacattcaaaaaagagtaataaacttcgccttaattttaataatcaacaccctcctagccttactactaataattattacattttgactaccacaactcaacggctacatagaaaaatccaccccttacgagtgcggcttcgaccctatatcccccgcccgcgtccctttctccataaaattcttcttagtagctattaccttcttattatttgatctagaaattgccctccttttacccctaccatgagccctacaaacaactaacctgccactaatagttatgtcatccctcttattaatcatcatcctagccctaagtctggcctatgagtgactacaaaaaggattagactgaaccgaattggtatatagtttaaacaaaacgaatgatttcgactcattaaattatgataatcatatttaccaaatgcccctcatttacataaatattatactagcatttaccatctcacttctaggaatactagtatatcgctcacacctcatatcctccctactatgcctagaaggaataatactatcgctgttcattatagctactctcataaccctcaacacccactccctcttagccaatattgtgcctattgccatactagtctttgccgcctgcgaagcagcggtgggcctagccctactagtctcaatctccaacacatatggcctagactacgtacataacctaaacctactccaatgctaaaactaatcgtcccaacaattatattactaccactgacatgactttccaaaaaacacataatttgaatcaacacaaccacccacagcctaattattagcatcatccctctactattttttaaccaaatcaacaacaacctatttagctgttccccaaccttttcctccgaccccctaacaacccccctcctaatactaactacctgactcctacccctcacaatcatggcaagccaacgccacttatccagcgaaccactatcacgaaaaaaactctacctctctatactaatctccctacaaatctccttaattataacattcacagccacagaactaatcatattttatatcttcttcgaaaccacacttatccccaccttggctatcatcacccgatgaggcaaccagccagaacgcctgaacgcaggcacatacttcctattctacaccctagtaggctcccttcccctactcatcgcactaatttacactcacaacaccctaggctcactaaacattctactactcactctcactgcccaagaactatcaaactcctgagccaacaacttaatatgactagcttacacaatagcttttatagtaaagatacctctttacggactccacttatgactccctaaagcccatgtcgaagcccccatcgctgggtcaatagtacttgccgcagtactcttaaaactaggcggctatggtataatacgcctcacactcattctcaaccccctgacaaaacacatagcctaccccttccttgtactatccctatgaggcataattataacaagctccatctgcctacgacaaacagacctaaaatcgctcattgcatactcttcaatcagccacatagccctcgtagtaacagccattctcatccaaaccccctgaagcttcaccggcgcagtcattctcataatcgcccacgggcttacatcctcattactattctgcctagcaaactcaaactacgaacgcactcacagtcgcatcataatcctctctcaaggacttcaaactctactcccactaatagctttttgatgacttctagcaagcctcgctaacctcgccttaccccccactattaacctactgggagaactctctgtgctagtaaccacgttctcctgatcaaatatcactctcctacttacaggactcaacatactagtcacagccctatactccctctacatatttaccacaacacaatggggctcactcacccaccacattaacaacataaaaccctcattcacacgagaaaacaccctcatgttcatacacctatcccccattctcctcctatccctcaaccccgacatcattaccgggttttcctcttgtaaatatagtttaaccaaaacatcagattgtgaatctgacaacagaggcttacgaccccttatttaccgagaaagctcacaagaactgctaactcatgcccccatgtctaacaacatggctttctcaacttttaaaggataacagctatccattggtcttaggccccaaaaattttggtgcaactccaaataaaagtaataaccatgcacactactataaccaccctaaccctgacttccctaattccccccatccttaccaccctcgttaaccctaacaaaaaaaactcatacccccattatgtaaaatccattgtcgcatccacctttattatcagtctcttccccacaacaatattcatgtgcctagaccaagaagttattatctcgaactgacactgagccacaacccaaacaacccagctctccctaagcttcaaactagactacttctccataatattcatccctgtagcattgttcgttacatggtccatcatagaattctcactgtgatatataaactcagacccaaacattaatcagttcttcaaatatctactcatcttcctaattaccatactaatcttagttaccgctaacaacctattccaactgttcatcggctgagagggcgtaggaattatatccttcttgctcatcagttgatgatacgcccgagcagatgccaacacagcagccattcaagcaatcctatacaaccgtatcggcgatatcggtttcatcctcgccttagcatgatttatcctacactccaactcatgagacccacaacaaatagcccttctaaacgctaatccaagcctcaccccactactaggcctcctcctagcagcagcaggcaaatcagcccaattaggtctccacccctgactcccctcagccatagaaggccccaccccagtctcagccctactccactcaagcactatagttgtagcaggaatcttcttactcatccgcttccaccccctagcagaaaatagcccactaatccaaactctaacactatgcttaggcgctatcaccactctgttcgcagcagtctgcgcccttacacaaaatgacatcaaaaaaatcgtagccttctccacttcaagtcaactaggactcataatagttacaatcggcatcaaccaaccacacctagcattcctgcacatctgtacccacgccttcttcaaagccatactatttatgtgctccgggtccatcatccacaaccttaacaatgaacaagatattcgaaaaataggaggactactcaaaaccatacctctcacttcaacctccctcaccattggcagcctagcattagcaggaatacctttcctcacaggtttctactccaaagaccacatcatcgaaaccgcaaacatatcatacacaaacgcctgagccctatctattactctcatcgctacctccctgacaagcgcctatagcactcgaataattcttctcaccctaacaggtcaacctcgcttccccacccttactaacattaacgaaaataaccccaccctactaaaccccattaaacgcctggcagccggaagcctattcgcaggatttctcattactaacaacatttcccccgcatcccccttccaaacaacaatccccctctacctaaaactcacagccctcgctgtcactttcctaggacttctaacagccctagacctcaactacctaaccaacaaacttaaaataaaatccccactatgcacattttatttctccaacatactcggattctaccctagcatcacacaccgcacaatcccctatctaggccttcttacgagccaaaacctgcccctactcctcctagacctaacctgactagaaaagctattacctaaaacaatttcacagcaccaaatctccacctccatcatcacctcaacccaaaaaggcataattaaactttacttcctctctttcttcttcccactcatcctaaccctactcctaatcacataacctattcccccgagcaatctcaattacaatatatacaccaacaaacaatgttcaaccagtaactactactaatcaacgcccataatcatacaaagcccccgcaccaataggatcctcccgaatcaaccctgacccctctccttcataaattattcagcttcctacactattaaagtttaccacaaccaccaccccatcatactctttcacccacagcaccaatcctacctccatcgctaaccccactaaaacactcaccaagacctcaacccctgacccccatgcctcaggatactcctcaatagccatcgctgtagtatatccaaagacaaccatcattccccctaaataaattaaaaaaactattaaacccatataacctcccccaaaattcagaataataacacacccgaccacaccgctaacaatcaatactaaacccccataaataggagaaggcttagaagaaaaccccacaaaccccattactaaacccacactcaacagaaacaaagcatacatcattattctcgcacggactacaaccacgaccaatgatatgaaaaaccatcgttgtatttcaactacaagaacaccaatgaccccaatacgcaaaactaaccccctaataaaattaattaaccactcattcatcgacctccccaccccatccaacatctccgcatgatgaaacttcggctcactccttggcgcctgcctgatcctccaaatcaccacaggactattcctagccatgcactactcaccagacgcctcaaccgccttttcatcaatcgcccacatcactcgagacgtaaattatggctgaatcatccgctaccttcacgccaatggcgcctcaatattctttatctgcctcttcctacacatcgggcgaggcctatattacggatcatttctctactcagaaacctgaaacatcggcattatcctcctgcttgcaactatagcaacagccttcataggctatgtcctcccgtgaggccaaatatcattctgaggggccacagtaattacaaacttactatccgccatcccatacattgggacagacctagttcaatgaatctgaggaggctactcagtagacagtcccaccctcacacgattctttacctttcacttcatcttgcccttcattattgcagccctagcagcactccacctcctattcttgcacgaaacgggatcaaacaaccccctaggaatcacctcccattccgataaaatcaccttccacccttactacacaatcaaagacgccctcggcttacttctcttccttctctccttaatgacattaacactattctcaccagacctcctaggcgacccagacaattataccctagccaaccccttaaacacccctccccacatcaagcccgaatgatatttcctattcgcctacacaattctccgatccgtccctaacaaactaggaggcgtccttgccctattactatccatcctcatcctagcaataatccccatcctccatatatccaaacaacaaagcataatatttcgcccactaagccaatcactttattgactcctagccgcagacctcctcattctaacctgaatcggaggacaaccagtaagctacccttttaccatcattggacaagtagcatccgtactatacttcacaacaatcctaatcctaataccaactatctccctaattgaaaacaaaatactcaaatgggcctgtccttgtagtataaactaatacaccagtcttgtaaaccggagatgaaaacctttttccaaggacaaatcagagaaaaagtctttaactccaccattagcacccaaagctaagattctaatttaaactattctctgttctttcatggggaagcagatttgggtaccacccaagtattgactcacccatcaacaatcgctatgtatttcgtacattactgccagccaccatgaatattgtacggtaccataaatacttgaccacctgtagtacataaaaacccaatccacatcaaaaccccctccccatgcttacaagcaagtacagcaatcaaccctcaactatcacacatcaactgcaactccaaagccacccctcacccactaggataccaacaaacctacccacccttaacagtacatagcacataaagccatttaccgtacatagcacattacagtcaaatcccttctcgtccccatggatgacccccctcagataggggtcccttgaccaccatcctccgtgaaatcaatatcccgcacaagagtgctactctcctcgctccgggcccataacacttgggggtagctaaagtgaactgtatccgacatctggttcctacttcagggccataaagcctaaatagcccacacgttccccttaaataagacatcacgatg

SEQ ID NO: 559 - DNA, 16567 bp, Homo sapiens mitochondrial
  3105: "n" refers to a nucleotide at position 3107 of the Cambridge Reference Sequence (CRS, Anderson et al. 1981 Nature 290:457-465), later determined to be absent from the human mtDNA sequence according to the revised CRS (rCRS, Andrews et al. 1999 Nature Genetics 23:147); "n" therefore represents a single nucleotide deletion at a position corresponding to nucleotide 3107 of SEQ ID NO:1 as provided herein.
gatcacaggtctatcaccctattaaccactcacgggagctctccatgcatttggtattttcgtctggggggtatgcacgcgatagcattgcgagacgctggagccggagcaccctatgtcgcagtatctgtctttgattcctgcctcatcctattatttatcgcacctacgttcaatattacaggcgaacatacttactaaagtgtgttaattaattaatgcttgtaggacataataataacaattgaatgtctgcacagccgctttccacacagacatcataacaaaaaatttccaccaaaccccccctcccccgcttctggccacagcacttaaacacatctctgccaaaccccaaaaacaaagaaccctaacaccagcctaaccagatttcaaattttatcttttggcggtatgcacttttaacagtcaccccccaactaacacattatttttccctcccactcccatactactaatctcatcaatacaacccccgcccatcctacccagcacacacaccgctgctaaccccataccccgaaccaaccaaaccccaaagacaccccccacagtttatgtagcttacctcctcaaagcaatacactgaaaatgtttagacgggctcacatcaccccataaacaaataggtttggtcctagcctttctattagctcttagtaagattacacatgcaagcatccccgttccagtgagttcaccctctaaatcaccacgatcaaaagggacaagcatcaagcacgcagcaatgcagctcaaaacgcttagcctagccacacccccacgggaaacagcagtgattaacctttagcaataaacgaaagtttaactaagctatactaaccccagggttggtcaatttcgtgccagccaccgcggtcacacgattaacccaagtcaatagaagccggcgtaaagagtgttttagatcaccccctccccaataaagctaaaactcacctgagttgtaaaaaactccagttgacacaaaatagactacgaaagtggctttaacatatctgaacacacaatagctaagacccaaactgggattagataccccactatgcttagccctaaacctcaacagttaaatcaacaaaactgctcgccagaacactacgagccacagcttaaaactcaaaggacctggcggtgcttcatatccctctagaggagcctgttctgtaatcgataaaccccgatcaacctcaccacctcttgctcagcctatataccgccatcttcagcaaaccctgatgaaggctacaaagtaagcgcaagtacccacgtaaagacgttaggtcaaggtgtagcccatgaggtggcaagaaatgggctacattttctaccccagaaaactacgatagcccttatgaaacttaagggtcgaaggtggatttagcagtaaactgagagtagagtgcttagttgaacagggccctgaagcgcgtacacaccgcccgtcaccctcctcaagtatacttcaaaggacatttaactaaaacccctacgcatttatatagaggagacaagtcgtaacatggtaagtgtactggaaagtgcacttggacgaaccagagtgtagcttaacacaaagcacccaacttacacttaggagatttcaacttaacttgaccgctctgagctaaacctagccccaaacccactccaccttactaccagacaaccttagccaaaccatttacccaaataaagtataggcgatagaaattgaaacctggcgcaatagatatagtaccgcaagggaaagatgaaaaattataaccaagcataatatagcaaggactaacccctataccttctgcataatgaattaactagaaataactttgcaaggagagccaaagctaagacccccgaaaccagacgagctacctaagaacagctaaaagagcacacccgtctatgtagcaaaatagtgggaagatttataggtagaggcgacaaacctaccgagcctggtgatagctggttgtccaagatagaatcttagttcaactttaaatttgcccacagaaccctctaaatccccttgtaaatttaactgttagtccaaagaggaacagctctttggacactaggaaaaaaccttgtagagagagtaaaaaatttaacacccatagtaggcctaaaagcagccaccaattaagaaagcgttcaagctcaacacccactacctaaaaaatcccaaacatataactgaactcctcacacccaattggaccaatctatcaccctatagaagaactaatgttagtataagtaacatgaaaacattctcctccgcataagcctgcgtcagattaaaacactgaactgacaattaacagcccaatatctacaatcaaccaacaagtcattattaccctcactgtcaacccaacacaggcatgctcataaggaaaggttaaaaaaagtaaaaggaactcggcaaatcttaccccgcctgtttaccaaaaacatcacctctagcatcaccagtattagaggcaccgcctgcccagtgacacatgtttaacggccgcggtaccctaaccgtgcaaaggtagcataatcacttgttccttaaatagggacctgtatgaatggctccacgagggttcagctgtctcttacttttaaccagtgaaattgacctgcccgtgaagaggcgggcataacacagcaagacgagaagaccctatggagctttaatttattaatgcaaacagtacctaacaaacccacaggtcctaaactaccaaacctgcattaaaaatttcggttggggcgacctcggagcagaacccaacctccgagcagtacatgctaagacttcaccagtcaaagcgaactactatactcaattgatccaataacttgaccaacggaacaagttaccctagggataacagcgcaatcctattctagagtccatatcaacaatagggtttacgacctcgatgttggatcaggacatcccgatggtgcagccgctattaaaggttcgtttgttcaacgattaaagtcctacgtgatctgagttcagaccggagtaatccaggtcggtttctatctacnttcaaattcctccctgtacgaaaggacaagagaaataaggcctacttcacaaagcgccttcccccgtaaatgatatcatctcaacttagtattatacccacacccacccaagaacagggtttgttaagatggcagagcccggtaatcgcataaaacttaaaactttacagtcagaggttcaattcctcttcttaacaacatacccatggccaacctcctactcctcattgtacccattctaatcgcaatggcattcctaatgcttaccgaacgaaaaattctaggctatatacaactacgcaaaggccccaacgttgtaggcccctacgggctactacaacccttcgctgacgccataaaactcttcaccaaagagcccctaaaacccgccacatctaccatcaccctctacatcaccgccccgaccttagctctcaccatcgctcttctactatgaacccccctccccatacccaaccccctggtcaacctcaacctaggcctcctatttattctagccacctctagcctagccgtttactcaatcctctgatcagggtgagcatcaaactcaaactacgccctgatcggcgcactgcgagcagtagcccaaacaatctcatatgaagtcaccctagccatcattctactatcaacattactaataagtggctcctttaacctctccacccttatcacaacacaagaacacctctgattactcctgccatcatgacccttggccataatatgatttatctccacactagcagagaccaaccgaacccccttcgaccttgccgaaggggagtccgaactagtctcaggcttcaacatcgaatacgccgcaggccccttcgccctattcttcatagccgaatacacaaacattattataataaacaccctcaccactacaatcttcctaggaacaacatatgacgcactctcccctgaactctacacaacatattttgtcaccaagaccctacttctaacctccctgttcttatgaattcgaacagcatacccccgattccgctacgaccaactcatacacctcctatgaaaaaacttcctaccactcaccctagcattacttatatgatatgtctccatacccattacaatctccagcattccccctcaaacctaagaaatatgtctgataaaagagttactttgatagagtaaataataggagcttaaacccccttatttctaggaccatgagaatcgaacccatccctgagaatccaaaattctccgtgccacctatcacaccccatcctaaagtaaggtcagctaaataagctatcgggcccataccccgaaaatgttggttatacccttcccgtactaattaatcccctggcccaacccgtcatctactctaccatctttgcaggcacactcatcacagcgctaagctcgcactgattttttacctgagtaggcctagaaataaacatgctagcttttattccagttctaaccaaaaaaataaaccctcgttccacagaagctgccatcaagtatttcctcacgcaagcaaccgcatccataatccttctaatagctatcctcttcaacaatatactctccggacaatgaaccataaccaatactaccaatcaatactcatcattaataatcataatggctatagcaataaaactaggaatagccccctttcacttctgagtcccagaggttacccaaggcacccctctgacatccggcctgcttcttctcacatgacaaaaactagcccccatctcaatcatataccaaatctctccctcactaaacgtaagccttctcctcactctctcaatcttatccatcatagcaggcagttgaggtggattaaaccaaacccagctacgcaaaatcttagcatactcctcaattacccacataggatgaataatagcagttctaccgtacaaccctaacataaccattcttaatttaactatttatattatcctaactactaccgcattcctactactcaacttaaactccagcaccacgaccctactactatctcgcacctgaaacaagctaacatgactaacacccttaattccatccaccctcctctccctaggaggcctgcccccgctaaccggctttttgcccaaatgggccattatcgaagaattcacaaaaaacaatagcctcatcatccccaccatcatagccaccatcaccctccttaacctctacttctacctacgcctaatctactccacctcaatcacactactccccatatctaacaacgtaaaaataaaatgacagtttgaacatacaaaacccaccccattcctccccacactcatcgcccttaccacgctactcctacctatctccccttttatactaataatcttatagaaatttaggttaaatacagaccaagagccttcaaagccctcagtaagttgcaatacttaatttctgtaacagctaaggactgcaaaaccccactctgcatcaactgaacgcaaatcagccactttaattaagctaagcccttactagaccaatgggacttaaacccacaaacacttagttaacagctaagcaccctaatcaactggcttcaatctacttctcccgccgccgggaaaaaaggcgggagaagccccggcaggtttgaagctgcttcttcgaatttgcaattcaatatgaaaatcacctcggagctggtaaaaagaggcctaacccctgtctttagatttacagtccaatgcttcactcagccattttacctcacccccactgatgttcgccgaccgttgactattctctacaaaccacaaagacattggaacactatacctattattcggcgcatgagctggagtcctaggcacagctctaagcctccttattcgagccgagctgggccagccaggcaaccttctaggtaacgaccacatctacaacgttatcgtcacagcccatgcatttgtaataatcttcttcatagtaatacccatcataatcggaggctttggcaactgactagttcccctaataatcggtgcccccgatatggcgtttccccgcataaacaacataagcttctgactcttacctccctctctcctactcctgctcgcatctgctatagtggaggccggagcaggaacaggttgaacagtctaccctcccttagcagggaactactcccaccctggagcctccgtagacctaaccatcttctccttacacctagcaggtgtctcctctatcttaggggccatcaatttcatcacaacaattatcaatataaaaccccctgccataacccaataccaaacgcccctcttcgtctgatccgtcctaatcacagcagtcctacttctcctatctctcccagtcctagctgctggcatcactatactactaacagaccgcaacctcaacaccaccttcttcgaccccgccggaggaggagaccccattctataccaacacctattctgatttttcggtcaccctgaagtttatattcttatcctaccaggcttcggaataatctcccatattgtaacttactactccggaaaaaaagaaccatttggatacataggtatggtctgagctatgatatcaattggcttcctagggtttatcgtgtgagcacaccatatatttacagtaggaatagacgtagacacacgagcatatttcacctccgctaccataatcatcgctatccccaccggcgtcaaagtatttagctgactcgccacactccacggaagcaatatgaaatgatctgctgcagtgctctgagccctaggattcatctttcttttcaccgtaggtggcctgactggcattgtattagcaaactcatcactagacatcgtactacacgacacgtactacgttgtagcccacttccactatgtcctatcaataggagctgtatttgccatcataggaggcttcattcactgatttcccctattctcaggctacaccctagaccaaacctacgccaaaatccatttcactatcatattcatcggcgtaaatctaactttcttcccacaacactttctcggcctatccggaatgccccgacgttactcggactaccccgatgcatacaccacatgaaacatcctatcatctgtaggctcattcatttctctaacagcagtaatattaataattttcatgatttgagaagccttcgcttcgaagcgaaaagtcctaatagtagaagaaccctccataaacctggagtgactatatggatgccccccaccctaccacacattcgaagaacccgtatacataaaatctagacaaaaaaggaaggaatcgaaccccccaaagctggtttcaagccaaccccatggcctccatgactttttcaaaaaggtattagaaaaaccatttcataactttgtcaaagttaaattataggctaaatcctatatatcttaatggcacatgcagcgcaagtaggtctacaagacgctacttcccctatcatagaagagcttatcacctttcatgatcacgccctcataatcattttccttatctgcttcctagtcctgtatgcccttttcctaacactcacaacaaaactaactaatactaacatctcagacgctcaggaaatagaaaccgtctgaactatcctgcccgccatcatcctagtcctcatcgccctcccatccctacgcatcctttacataacagacgaggtcaacgatccctcccttaccatcaaatcaattggccaccaatggtactgaacctacgagtacaccgactacggcggactaatcttcaactcctacatacttcccccattattcctagaaccaggcgacctgcgactccttgacgttgacaatcgagtagtactcccgattgaagcccccattcgtataataattacatcacaagacgtcttgcactcatgagctgtccccacattaggcttaaaaacagatgcaattcccggacgtctaaaccaaaccactttcaccgctacacgaccgggggtatactacggtcaatgctctgaaatctgtggagcaaaccacagtttcatgcccatcgtcctagaattaattcccctaaaaatctttgaaatagggcccgtatttaccctatagcaccccctctaccccctctagagcccactgtaaagctaacttagcattaaccttttaagttaaagattaagagaaccaacacctctttacagtgaaatgccccaactaaatactaccgtatggcccaccataattacccccatactccttacactattcctcatcacccaactaaaaatattaaacacaaactaccacctacctccctcaccaaagcccataaaaataaaaaattataacaaaccctgagaaccaaaatgaacgaaaatctgttcgcttcattcattgcccccacaatcctaggcctacccgccgcagtactgatcattctatttccccctctattgatccccacctccaaatatctcatcaacaaccgactaatcaccacccaacaatgactaatcaaactaacctcaaaacaaatgataaccatacacaacactaaaggacgaacctgatctcttatactagtatccttaatcatttttattgccacaactaacctcctcggactcctgcctcactcatttacaccaaccacccaactatctataaacctagccatggccatccccttatgagcgggcgcagtgattataggctttcgctctaagattaaaaatgccctagcccacttcttaccacaaggcacacctacaccccttatccccatactagttattatcgaaaccatcagcctactcattcaaccaatagccctggccgtacgcctaaccgctaacattactgcaggccacctactcatgcacctaattggaagcgccaccctagcaatatcaaccattaaccttccctctacacttatcatcttcacaattctaattctactgactatcctagaaatcgctgtcgccttaatccaagcctacgttttcacacttctagtaagcctctacctgcacgacaacacataatgacccaccaatcacatgcctatcatatagtaaaacccagcccatgacccctaacaggggccctctcagccctcctaatgacctccggcctagccatgtgatttcacttccactccataacgctcctcatactaggcctactaaccaacacactaaccatataccaatgatggcgcgatgtaacacgagaaagcacataccaaggccaccacacaccacctgtccaaaaaggccttcgatacgggataatcctatttattacctcagaagtttttttcttcgcaggatttttctgagccttttaccactccagcctagcccctaccccccaattaggagggcactggcccccaacaggcatcaccccgctaaatcccctagaagtcccactcctaaacacatccgtattactcgcatcaggagtatcaatcacctgagctcaccatagtctaatagaaaacaaccgaaaccaaataattcaagcactgcttattacaattttactgggtctctattttaccctcctacaagcctcagagtacttcgagtctcccttcaccatttccgacggcatctacggctcaacattttttgtagccacaggcttccacggacttcacgtcattattggctcaactttcctcactatctgcttcatccgccaactaatatttcactttacatccaaacatcactttggcttcgaagccgccgcctgatactggcattttgtagatgtggtttgactatttctgtatgtctccatctattgatgagggtcttactcttttagtataaatagtaccgttaacttccaattaactagttttgacaacattcaaaaaagagtaataaacttcgccttaattttaataatcaacaccctcctagccttactactaataattattacattttgactaccacaactcaacggctacatagaaaaatccaccccttacgagtgcggcttcgaccctatatcccccgcccgcgtccctttctccataaaattcttcttagtagctattaccttcttattatttgatctagaaattgccctccttttacccctaccatgagccctacaaacaactaacctgccactaatagttatgtcatccctcttattaatcatcatcctagccctaagtctggcctatgagtgactacaaaaaggattagactgaaccgaattggtatatagtttaaacaaaacgaatgatttcgactcattaaattatgataatcatatttaccaaatgcccctcatttacataaatattatactagcatttaccatctcacttctaggaatactagtatatcgctcacacctcatatcctccctactatgcctagaaggaataatactatcgctgttcattatagctactctcataaccctcaacacccactccctcttagccaatattgtgcctattgccatactagtctttgccgcctgcgaagcagcggtgggcctagccctactagtctcaatctccaacacatatggcctagactacgtacataacctaaacctactccaatgctaaaactaatcgtcccaacaattatattactaccactgacatgactttccaaaaaacacataatttgaatcaacacaaccacccacagcctaattattagcatcatccctctactattttttaaccaaatcaacaacaacctatttagctgttccccaaccttttcctccgaccccctaacaacccccctcctaatactaactacctgactcctacccctcacaatcatggcaagccaacgccacttatccagtgaaccactatcacgaaaaaaactctacctctctatactaatctccctacaaatctccttaattataacattcacagccacagaactaatcatattttatatcttcttcgaaaccacacttatccccaccttggctatcatcacccgatgaggcaaccagccagaacgcctgaacgcaggcacatacttcctattctacaccctagtaggctcccttcccctactcatcgcactaatttacactcacaacaccctaggctcactaaacattctactactcactctcactgcccaagaactatcaaactcctgagccaacaacttaatatgactagcttacacaatagcttttatagtaaagatacctctttacggactccacttatgactccctaaagcccatgtcgaagcccccatcgctgggtcaatagtacttgccgcagtactcttaaaactaggcggctatggtataatacgcctcacactcattctcaaccccctgacaaaacacatagcctaccccttccttgtactatccctatgaggcataattataacaagctccatctgcctacgacaaacagacctaaaatcgctcattgcatactcttcaatcagccacatagccctcgtagtaacagccattctcatccaaaccccctgaagcttcaccggcgcagtcattctcataatcgcccacgggcttacatcctcattactattctgcctagcaaactcaaactacgaacgcactcacagtcgcatcataatcctctctcaaggacttcaaactctactcccactaatagctttttgatgacttctagcaagcctcgctaacctcgccttaccccccactattaacctactgggagaactctctgtgctagtaaccacgttctcctgatcaaatatcactctcctacttacaggactcaacatactagtcacagccctatactccctctacatatttaccacaacacaatggggctcactcacccaccacattaacaacataaaaccctcattcacacgagaaaacaccctcatgttcatacacctatcccccattctcctcctatccctcaaccccgacatcattaccgggttttcctcttgtaaatatagtttaaccaaaacatcagattgtgaatctgacaacagaggcttacgaccccttatttaccgagaaagctcacaagaactgctaactcatgcccccatgtctaacaacatggctttctcaacttttaaaggataacagctatccattggtcttaggccccaaaaattttggtgcaactccaaataaaagtaataaccatgcacactactataaccaccctaaccctgacttccctaattccccccatccttaccaccctcgttaaccctaacaaaaaaaactcatacccccattatgtaaaatccattgtcgcatccacctttattatcagtctcttccccacaacaatattcatgtgcctagaccaagaagttattatctcgaactgacactgagccacaacccaaacaacccagctctccctaagcttcaaactagactacttctccataatattcatccctgtagcattgttcgttacatggtccatcatagaattctcactgtgatatataaactcagacccaaacattaatcagttcttcaaatatctactcatcttcctaattaccatactaatcttagttaccgctaacaacctattccaactgttcatcggctgagagggcgtaggaattatatccttcttgctcatcagttgatgatacgcccgagcagatgccaacacagcagccattcaagcaatcctatacaaccgtatcggcgatatcggtttcatcctcgccttagcatgatttatcctacactccaactcatgagacccacaacaaatagcccttctaaacgctaatccaagcctcaccccactactaggcctcctcctagcagcagcaggcaaatcagcccaattaggtctccacccctgactcccctcagccatagaaggccccaccccagtctcagccctactccactcaagcactatagttgtagcaggaatcttcttactcatccgcttccaccccctagcagaaaatagcccactaatccaaactctaacactatgcttaggcgctatcaccactctgttcgcagcagtctgcgcccttacacaaaatgacatcaaaaaaatcgtagccttctccacttcaagtcaactaggactcataatagttacaatcggcatcaaccaaccacacctagcattcctgcacatctgtacccacgccttcttcaaagccatactatttatgtgctccgggtccatcatccacaaccttaacaatgaacaagatattcgaaaaataggaggactactcaaaaccatacctctcacttcaacctccctcaccattggcagcctagcattagcaggaatacctttcctcacaggtttctactccaaagaccacatcatcgaaaccgcaaacatatcatacacaaacgcctgagccctatctattactctcatcgctacctccctgacaagcgcctatagcactcgaataattcttctcaccctaacaggtcaacctcgcttccccacccttactaacattaacgaaaataaccccaccctactaaaccccattaaacgcctggcagccggaagcctattcgcaggatttctcattactaacaacatttcccccgcatcccccttccaaacaacaatccccctctacctaaaactcacagccctcgctgtcactttcctaggacttctaacagccctagacctcaactacctaaccaacaaacttaaaataaaatccccactatgcacattttatttctccaacatactcggattctaccctagcatcacacaccgcacaatcccctatctaggccttcttacgagccaaaacctgcccctactcctcctagacctaacctgactagaaaagctattacctaaaacaatttcacagcaccaaatctccacctccatcatcacctcaacccaaaaaggcataattaaactttacttcctctctttcttcttcccactcatcctaaccctactcctaatcacataacctattcccccgagcaatctcaattacaatatatacaccaacaaacaatgttcaaccagtaactactactaatcaacgcccataatcatacaaagcccccgcaccaataggatcctcccgaatcaaccctgacccctctccttcataaattattcagcttcctacactattaaagtttaccacaaccaccaccccatcatactctttcacccacagcaccaatcctacctccatcgctaaccccactaaaacactcaccaagacctcaacccctgacccccatgcctcaggatactcctcaatagccatcgctgtagtatatccaaagacaaccatcattccccctaaataaattaaaaaaactattaaacccatataacctcccccaaaattcagaataataacacacccgaccacaccgctaacaatcaatactaaacccccataaataggagaaggcttagaagaaaaccccacaaaccccattactaaacccacactcaacagaaacaaagcatacatcattattctcgcacggactacaaccacgaccaatgatatgaaaaaccatcgttgtatttcaactacaagaacaccaatgaccccaatacgcaaaactaaccccctaataaaattaattaaccactcattcatcgacctccccaccccatccaacatctccgcatgatgaaacttcggctcactccttggcgcctgcctgatcctccaaatcaccacaggactattcctagccatgcactactcaccagacgcctcaaccgccttttcatcaatcgcccacatcactcgagacgtaaattatggctgaatcatccgctaccttcacgccaatggcgcctcaatattctttatctgcctcttcctacacatcgggcgaggcctatattacggatcatttctctactcagaaacctgaaacatcggcattatcctcctgcttgcaactatagcaacagccttcataggctatgtcctcccgtgaggccaaatatcattctgaggggccacagtaattacaaacttactatccgccatcccatacattgggacagacctagttcaatgaatctgaggaggctactcagtagacagtcccaccctcacacgattctttacctttcacttcatcttgcccttcattattgcagccctagcagcactccacctcctattcttgcacgaaacgggatcaaacaaccccctaggaatcacctcccattccgataaaatcaccttccacccttactacacaatcaaagacgccctcggcttacttctcttccttctctccttaatgacattaacactattctcaccagacctcctaggcgacccagacaattataccctagccaaccccttaaacacccctccccacatcaagcccgaatgatatttcctattcgcctacacaattctccgatccgtccctaacaaactaggaggcgtccttgccctattactatccatcctcatcctagcaataatccccatcctccatatatccaaacaacaaagcataatatttcgcccactaagccaatcactttattgactcctagccgcagacctcctcattctaacctgaatcggaggacaaccagtaagctacccttttaccatcattggacaagtagcatccgtactatacttcacaacaatcttaatcctaataccaactatctccctaattgaaaacaaaatactcaaatgggcctgtccttgtagtataaactaatacaccagtcttgtaaaccggagatgaaaacctttttccaaggacaaatcagagaaaaagtctttaactccaccattagcacccaaagctaagattctaatttaaactattctctgttctttcatggggaagcagatttgggtaccacccaagtattgactcacccatcaacaaccgctatgtatttcgtacattactgccagccaccatgaatattgtacggtaccataaatacttgaccacctgtagtacataaaaacccaatccacatcaaaaccccctccccatgcttacaagcaagtacagcaatcaaccctcaactatcacacatcaactgcaactccaaagccacccctcacccactaggataccaacaaacctacccacccttaacagcacatagtacataaagccatttaccgtacatagcacattacagtcaaatcccttctcgtccccatggatgacccccctcagataggggtcccttgaccaccatcctccgtgaaatcaatatcccgcacaagagtgctactctcctcgctccgggcccataacacttgggggtagctaaagtgaactgtatccgacatctggttcctacttcagggtcataaagcctaaatagcccacacgttccccttaaataagacatcacgatg

SEQ ID NO: 560 - DNA, 16570 bp, Homo sapiens mitochondrial
  3108: "n" refers to a nucleotide at position 3107 of the Cambridge Reference Sequence (CRS, Anderson et al. 1981 Nature 290:457-465), later determined to be absent from the human mtDNA sequence according to the revised CRS (rCRS, Andrews et al. 1999 Nature Genetics 23:147); "n" therefore represents a single nucleotide deletion at a position corresponding to nucleotide 3107 of SEQ ID NO:1 as provided herein.
gatcacaggtctatcaccctattaaccactcacgggagctctccatgcatttggtattttcgtctggggggtatgcacgcgatagcattgcgggacgctggagccggagcaccctatgtcgcagtatctgtctttgattcctgcctcatcctattatttatcgcacctacgttcaatattacaggcgaacatacttactaaagtgtgttaattaattaatgcttgtaggacataataataacaattgaatgtctgcgcagccgctttccacacagacatcataacaaaaaatttccaccaaaccccccctcccccgccttctggccacagcacttaaacacatctctgccaaaccccaaaaacaaagaaccctaacaccagcctaaccagatttcaaattttatcttttggcggtatgcacttttaacagtcaccccccaactaacacattattttcccctcccactcccatactaccaatctcatcaatacaacccccgcccatcctacccagcacacacacaccgctgctaaccccataccccgaaccaaccaaaccccaaagacaccccccacagtttatgtagcttacctcctcaaagcaatacactgaaaatgtttagacgggctcacatcaccccataaacaaataggtttggtcctagcctttctattagctcttagtaagattacacatgcaagcatccccgttccagtgagttcaccctctaaatcaccacgatcaaaagggacaagcatcaagcacgcagcaatgcagctcaaaacgcttagcctagccacacccccacgggaaacagcagtgattaacctttagcaataaacgaaagtttaactaagctatactaaccccagggttggtcaatttcgtgccagccaccgcggtcacacgattaacccaagtcaatagaagccggcgtaaagagtgttttagatcaccccctccccaataaagctaaaactcacctgagttgtaaaaaactccagttgacacaaaatagactacgaaagtggctttaacatatctgaacacacaatagctaagacccaaactgggattagataccccactatgcttagccctaaacctcaacagttaaatcaacaaaactgctcgccagaacactacgagccacagcttaaaactcaaaggacctggcggtgcttcatatccctctagaggagcctgttctgtaatcgataaaccccgatcaacctcaccacctcttgctcagcctatataccgccatcttcagcaaaccctgatgaaggctacaaagtaagcgcaagtacccacgtaaagacgttaggtcaaggtgtagcccatgaggtggcaagaaatgggctacattttctaccccagaaaactacgatagcccttatgaaacttaagggtcgaaggtggatttagcagtaaactgagagtagagtgcttagttgaacagggccctgaagcgcgtacacaccgcccgtcaccctcctcaagtatacttcaaaggacatttaactaaaacccctacgcatttatatagaggagacaagtcgtaacatggtaagtgtactggaaagtgcacttggacgaaccagagtgtagcttaacacaaagcacccaacttacacttaggagatttcaacttaacttgaccgctctgagctaaacctagccccaaacccactccaccttactaccagacaaccttagccaaaccatttacccaaataaagtataggcgatagaaattgaaacctggcgcaatagatatagtaccgcaagggaaagatgaaaaattataaccaagcataatatagcaaggactaacccctataccttctgcataatgaattaactagaaataactttgcaaggagagccaaagctaagacccccgaaaccagacgagctacctaagaacagctaaaagagcacacccgtctatgtagcaaaatagtgggaagatttataggtagaggcgacaaacctaccgagcctggtgatagctggttgtccaagatagaatcttagttcaactttaaatttgcccacagaaccctctaaatccccttgtaaatttaactgttagtccaaagaggaacagctctttggacactaggaaaaaaccttgtagagagagtaaaaaatttaacacccatagtaggcctaaaagcagccaccaattaagaaagcgttcaagctcaacacccactacctaaaaaatcccaaacatataactgaactcctcacacccaattggaccaatctatcaccctatagaagaactaatgttagtataagtaacatgaaaacattctcctccgcataagcctgcgtcagattaaaacactgaactgacaattaacagcccaatatctacaatcaaccaacaagtcattattaccctcactgtcaacccaacacaggcatgctcataaggaaaggttaaaaaaagtaaaaggaactcggcaaatcttaccccgcctgtttaccaaaaacatcacctctagcatcaccagtattagaggcaccgcctgcccagtgacacatgtttaacggccgcggtaccctaaccgtgcaaaggtagcataatcacttgttccttaaatagggacctgtatgaatggctccacgagggttcagctgtctcttacttttaaccagtgaaattgacctgcccgtgaagaggcgggcataacacagcaagacgagaagaccctatggagctttaatttattaatgcaaacagtacctaacaaacccacaggtcctaaactaccaaacctgcattaaaaatttcggttggggcgacctcggagcagaacccaacctccgagcagtacatgctaagacttcaccagtcaaagcgaactactatactcaattgatccaataacttgaccaacggaacaagttaccctagggataacagcgcaatcctattctagagtccatatcaacaatagggtttacgacctcgatgttggatcaggacatcccaatggtgcagccgctattaaaggttcgtttgttcaacgattaaagtcctacgtgatctgagttcagaccggagtaatccaggtcggtttctatctacnttcaaattcctccctgtacgaaaggacaagagaaataaggcctacttcacaaagcgccttcccccgtaaatgatatcatctcaacttagtattatacccacacccacccaagaacagggtttgttaagatggcagagcccggtaatcgcataaaacttaaaactttacagtcagaggttcaattcctcttcttaacaacatacccatggccaacctcctactcctcattgtacccattctaatcgcaatggcattcctaatgcttaccgaacgaaaaattctaggctatatacaactacgcaaaggccccaacgttgtaggcccctacgggctactacaacccttcgctgacgccataaaactcttcaccaaagagcccctaaaacccgccacatctaccatcaccctctacatcaccgccccgaccttagctctcaccatcgctcttctactatgaacccccctccccatacccaaccccctggtcaacctcaacctaggcctcctatttattctagccacctctagcctagccgtttactcaatcctctgatcagggtgagcatcaaactcaaactacgccctgatcggcgcactgcgagcagtagcccaaacaatctcatatgaagtcaccctagccatcattctactatcaacattactaataagtggctcctttaacctctccacccttatcacaacacaagaacacctctgattactcctgccatcatgacccttggccataatatgatttatctccacactagcagagaccaaccgaacccccttcgaccttgccgaaggggagtccgaactagtctcaggcttcaacatcgaatacgccgcaggccccttcgccctattcttcatagccgaatacacaaacattattataataaacaccctcaccactacaatcttcctaggaacaacatatgacgcactctcccctgaactctacacaacatattttgtcaccaagaccctacttctaacctccctgttcttatgaattcgaacagcatacccccgattccgctacgaccaactcatacacctcctatgaaaaaacttcctaccactcaccctagcattacttatatgatatgtctccatacccattacaatctccagcattccccctcaaacctaagaaatatgtctgataaaagagttactttgatagagtaaataataggagcttaaacccccttatttctaggactatgagaatcgaacccatccctgagaatccaaaattctccgtgccacctatcacaccccatcctaaagtaaggtcagctaaataagctatcgggcccataccccgaaaatgttggttatacccttcccgtactaattaatcccctggcccaacccgtcatctactctaccatctttgcaggcacactcatcacagcgctaagctcgcactgattttttacctgagtaggcctagaaataaacatgctagcttttattccagttctaaccaaaaaaataaaccctcgttccacagaagctgccatcaagtatttcctcacgcaagcaaccgcatccataatccttctaatagctatcctcttcaacaatatactctccggacaatgaaccataaccaatactaccaatcaatactcatcattaataatcataatggctatagcaataaaactaggaatagccccctttcacttctgagtcccagaggttacccaaggcacccctctgacatccggcctgcttcttctcacatgacaaaaactagcccccatctcaatcatataccaaatctctccctcactaaacgtaagccttctcctcactctctcaatcttatccatcatagcaggcagttgaggtggattaaaccaaacccagctacgcaaaatcttagcatactcctcaattacccacataggatgaataatagcagttctaccgtacaaccctaacataaccattcttaatttaactatttatattatcctaactactaccgcattcctactactcaacttaaactccagcaccacgaccctactactatctcgcacctgaaacaagctaacatgactaacacccttaattccatccaccctcctctccctaggaggcctgcccccgctaaccggctttttgcccaaatgggccattatcgaagaattcacaaaaaacaatagcctcatcatccccaccatcatagccaccatcaccctccttaacctctacttctacctacgcctaatctactccacctcaatcacactactccccatatctaacaacgtaaaaataaaatgacagtttgaacatacaaaacccaccccattcctccccacactcatcgcccttaccacgctactcctacctatctccccttttatactaataatcttatagaaatttaggttaaatacagaccaagagccttcaaagccctcagtaagttgcaatacttaatttctgtaacagctaaggactgcaaaaccccactctgcatcaactgaacgcaaatcagccactttaattaagctaagcccttactagaccaatgggacttaaacccacaaacacttagttaacagctaagcaccctaatcaactggcttcaatctacttctcccgccgccgggaaaaaaggcgggagaagccccggcaggtttgaagctgcttcttcgaatttgcaattcaatatgaaaatcacctcggagctggtaaaaagaggcctaacccctgtctttagatttacagtccaatgcttcactcagccattttacctcacccccactgatgttcgccgaccgttgactattctctacaaaccacaaagacattggaacactatacctattattcggcgcatgagctggagtcctaggcacagctctaagcctccttattcgagccgagctgggccagccaggcaaccttctaggtaacgaccacatctacaacgttatcgtcacagcccatgcatttgtaataatcttcttcatagtaatacccatcataatcggaggctttggcaactgactagttcccctaataatcggtgcccccgatatggcgtttccccgcataaacaacataagcttctgactcttacctccctctctcctactcctgctcgcatctgctatagtggaggccggagcaggaacaggttgaacagtctaccctcccttagcagggaactactcccaccctggagcctccgtagacctaaccatcttctccttacacctagcaggtgtctcctctatcttaggggccatcaatttcatcacaacaattatcaatataaaaccccctgccataacccaataccaaacgcccctcttcgtctgatccgtcctaatcacagcagtcctacttctcctatctctcccagtcctagctgctggcatcactatactactaacagaccgcaacctcaacaccaccttcttcgaccccgccggaggaggagaccccattctataccaacacctattctgatttttcggtcaccctgaagtttatattcttatcctaccaggcttcggaataatctcccatattgtaacttactactccggaaaaaaagaaccatttggatacataggtatggtctgagctatgatatcaattggcttcctagggtttatcgtgtgagcacaccatatatttacagtaggaatagacgtagacacacgagcatatttcacctccgctaccataatcatcgctatccccaccggcgtcaaagtatttagctgactcgccacactccacggaagcaatatgaaatgatctgctgcagtgctctgagccctaggattcatctttcttttcaccgtaggtggcctgactggcattgtattagcaaactcatcactagacatcgtactacacgacacgtactacgttgtagcccacttccactatgtcctatcaataggagctgtatttgccatcataggaggcttcattcactgatttcccctattctcaggctacaccctagaccaaacctacgccaaaatccatttcactatcatattcatcggcgtaaatctaactttcttcccacaacactttctcggcctatccggaatgccccgacgttactcggactaccccgatgcatacaccacatgaaacatcctatcatctgcaggctcattcatttctctaacagcagtaatattaataattttcatgatttgagaagccttcgcttcgaagcgaaaagtcctaatagtagaagaaccctccataaacctggagtgactatatggatgccccccaccctaccacacattcgaagaacccgtatacataaaatctagacaaaaaaggaaggaatcgaaccccccaaagctggtttcaagccaaccccatggcctccatgactttttcaaaaaggtattagaaaaaccatttcataactttgtcaaagttaaattataggctaaatcctatatatcttaatggcacatgcagcgcaagtaggtctacaagacgctacttcccctatcatagaagagcttatcacctttcatgatcacgccctcataatcattttccttatctgcttcctagtcctgtatgcccttttcctaacactcacaacaaaactaactaatactaacatctcagacgctcaggaaatagaaaccgtctgaactatcctgcccgccatcatcctagtcctcatcgccctcccatccctacgcatcctttacataacagacgaggtcaacgatccctcccttaccatcaaatcaattggccaccaatggtactgaacctacgagtacaccgactacggcggactaatcttcaactcctacatacttcccccattattcctagaaccaggcgacctgcgactccttgacgttgacaatcgagtagtactcccgattgaagcccccattcgtataataattacatcacaagacgtcttgcactcatgagctgtccccacattaggcttaaaaacagatgcaattcccggacgtctaaaccaaaccactttcaccgctacacgaccgggggtatactacggtcaatgctctgaaatctgtggagcaaaccacagtttcatgcccatcgtcctagaattaattcccctaaaaatctttgaaatagggcccgtatttaccctatagcaccccctctaccccctctagagcccactgtaaagctaacttagcattaaccttttaagttaaagattaagagaaccaacacctctttacagtgaaatgccccaactaaatactaccgtatggcccaccataattacccccatactccttacactattcctcatcacccaactaaaaatattaaacacaaactaccacctacccccctcaccaaagcccataaaaataaaaaattataacaaaccctgagaaccaaaatgaacgaaaatctgttcgcttcattcattgcccccacaatcctaggcctacccgccgcagtactgatcattctatttccccctctattgatccccacctccaaatatctcatcaacaaccgactaatcaccacccaacaatgactaatcaaactaacctcaaaacaaatgataaccatacacaacactaaaggacgaacctgatctcttatactagtatccttaatcatttttattgccacaactaacctcctcggactcctgcctcactcatttacaccaaccacccaactatctataaacctagccatggccatccccttatgagcgggcgcagtgattataggctttcgctctaagattaaaaatgccctagcccacttcttaccacaaggcacacctacaccccttatccccatactagttattatcgaaaccatcagcctactcattcaaccaatagccctggccgtacgcctaaccgctaacattactgcaggccacctactcatgcacctaattggaagcgccaccctagcaatatcaaccattaaccttccctctacacttatcatcttcacaattctaattctactgactatcctagaaatcgctgtcgccttaatccaagcctacgttttcacacttctagtaagcctctacctgcacgacaacacataatgacccaccaatcacatgcctatcatatagtaaaacccagcccatgacccctaacaggggccctctcagccctcctaatgacctccggcctagccatgtgatttcacttccactccataacgctcctcatactaggcctactaaccaacacactaaccatataccaatgatggcgcgatgtaacacgagaaagcacataccaaggccaccacacaccacctgtccaaaaaggccttcgatacgggataatcctatttattacctcagaagtttttttcttcgcaggatttttctgagccttttaccactccagcctagcccctaccccccaattaggagggcactggcccccaacaggcatcaccccgctaaatcccctagaagtcccactcctaaacacatccgtattactcgcatcaggagtatcaatcacctgagctcaccatagtctaatagaaaacaaccgaaaccaaataattcaagcactgcttattacaattttactgggtctctattttaccctcctacaagcctcagagtacttcgagtctcccttcaccatttccgacggcatctacggctcaacattttttgtagccacaggcttccacggacttcacgtcattattggctcaactttcctcactatctgcttcatccgccaactaatatttcactttacatccaaacatcactttggcttcgaagccgccgcctgatactggcattttgtagatgtggtttgactatttctgtatgtctccatctattgatgagggtcttactcttttagtataaatagtaccgttaacttccaattaactagttttgacaacattcaaaaaagagtaataaacttcgccttaattttaataatcaacaccctcctagccttactactaataattattacattttgactaccacaactcaacggctacatagaaaaatccaccccttacgagtgcggcttcgaccctatatcccccgcccgcgtccctttctccataaaattcttcttagtagctattaccttcttattatttgatctagaaattgccctccttttacccctaccatgagccctacaaacaactaacctgccactaatagttatgtcatccctcttattaatcatcatcctagccctaagtctggcctatgagtgactacaaaaaggattagactgaaccgaattggtatatagtttaaacaaaacgaatgatttcgactcattaaattatgataatcatatttaccaaatgcccctcatttacataaatattatactagcatttaccatctcacttctaggaatactagtatatcgctcacacctcatatcctccctactatgcctagaaggaataatactatcgctgttcattatagctactctcataaccctcaacacccactccctcttagccaatattgtgcctattgccatactagtctttgccgcctgcgaagcagcggtgggcctagccctactagtctcaatctccaacacatatggcctagactacgtacataacctaaacctactccaatgctaaaactaatcgtcccaacaattatattactaccactgacatgactttccaaaaaacacataatttgaatcaacacaaccacccacagcctaattattagcatcatccctctactattttttaaccaaatcaacaacaacctatttagctgttccccaaccttttcctccgaccccctaacaacccccctcctaatactaactacctgactcctacccctcacaatcatggcaagccaacgccacttatccagtgaaccactatcacgaaaaaaactctacctctctatactaatctccctacaaatctccttaattataacattcacagccacagaactaatcatattttatatcttcttcgaaaccacacttatccccaccttggctatcatcacccgatgaggcaaccagccagaacgcctgaacgcaggcacatacttcctattctacaccctagtaggctcccttcccctactcatcgcactaatttacactcacaacaccctaggctcactaaacattctactactcactctcactgcccaagaactatcaaactcctgagccaacaacttaatatgactagcttacacaatagcttttatagtaaagatacctctttacggactccacttatgactccctaaagcccatgtcgaagcccccatcgctgggtcaatagtacttgccgcagtactcttaaaactaggcggctatggtataatacgcctcacactcattctcaaccccctgacaaaacacatagcctaccccttccttgtactatccctatgaggcataattataacaagctccatctgcctacgacaaacagacctaaaatcgctcattgcatactcttcaatcagccacatagccctcgtagtaacagccattctcatccaaaccccctgaagcttcaccggcgcagtcattctcataatcgcccacgggcttacatcctcattactattctgcctagcaaactcaaactacgaacgcactcacagtcgcatcataatcctctctcaaggacttcaaactctactcccactaatagctttttgatgacttctagcaagcctcgctaacctcgccttaccccccactattaacctactgggagaactctctgtgctagtaaccacgttctcctgatcaaatatcactctcctacttacaggactcaacatactagtcacagccctatactccctctacatatttaccacaacacaatggggctcactcacccaccacattaacaacataaaaccctcattcacacgagaaaacaccctcatgttcatacacctatcccccattctcctcctatccctcaaccccgacatcattaccgggttttcctcttgtaaatatagtttaaccaaaacatcagattgtgaatctgacaacagaggcttacgaccccttatttaccgagaaagctcacaagaactgctaactcatgcccccatgtctaacaacatggctttctcaacttttaaaggataacagctatccattggtcttaggccccaaaaattttggtgcaactccaaataaaagtaataaccatgcacactactataaccaccctaaccctgacttccctaattccccccatccttaccaccctcgttaaccctaacaaaaaaaactcatacccccattatgtaaaatccattgtcgcatccacctttattatcagtctcttccccacaacaatattcatgtgcctagaccaagaagttattatctcgaactgacactgagccacaacccaaacaacccagctctccctaagcttcaaactagactacttctccataatattcatccctgtagcattgttcgttacatggtccatcatagaattctcactgtgatatataaactcagacccaaacattaatcagttcttcaaatatctactcatcttcctaattaccatactaatcttagttaccgctaacaacctattccaactgttcatcggctgagagggcgtaggaattatatccttcttgctcatcagttgatgatacgcccgagcagatgccaacacagcagccattcaagcaatcctatacaaccgtatcggcgatatcggtttcatcctcgccttagcatgatttatcctacactccaactcatgagacccacaacaaatagcccttctaaacgctaatccaagcctcaccccactactaggcctcctcctagcagcagcaggcaaatcagcccaattaggtctccacccctgactcccctcagccatagaaggccccaccccagtctcagccctactccactcaagcactatagttgtagcaggaatcttcttactcatccgcttccaccccctagcagaaaatagcccactaatccaaactctaacactatgcttaggcgctatcaccactctgttcgcagcagtctgcgcccttacacaaaatgacatcaaaaaaatcgtagccttctccacttcaagtcaactaggactcataatagttacaatcggcatcaaccaaccacacctagcattcctgcacatctgtacccacgccttcttcaaagccatactatttatgtgctccgggtccatcatccacaaccttaacaatgaacaagatattcgaaaaataggaggactactcaaaaccatacctctcacttcaacctccctcaccattggcagcctagcattagcaggaatacctttcctcacaggtttctactccaaagaccacatcatcgaaaccgcaaacatatcatacacaaacgcctgagccctatctattactctcatcgctacctccctgacaagcgcctatagcactcgaataattcttctcaccctaacaggtcaacctcgcttccccacccttactaacattaacgaaaataaccccaccctactaaaccccattaaacgcctggcagccggaagcctattcgcaggatttctcattactaacaacatttcccccgcatcccccttccaaacaacaatccccctctacctaaaactcacagccctcgctgtcactttcctaggacttctaacagccctagacctcaactacctaaccaacaaacttaaaataaaatccccactatgcacattttatttctccaacatactcggattctaccctagcatcacacaccgcacaatcccctatctaggccttcttacgagccaaaacctgcccctactcctcctagacctaacctgactagaaaagctattacctaaaacaatttcacagcaccaaatctccacctccatcatcacctcaacccaaaaaggcataattaaactttacttcctctctttcttcttcccactcatcctaaccctactcctaatcacataacctattcccccgagcaatctcaattacaatatatacaccaacaaacaatgttcaaccagtaactactactaatcaacgcccataatcatacaaagcccccgcaccaataggatcctcccgaatcaaccctgacccctctccttcataaattattcagcttcctacactattaaagtttaccacaaccaccaccccatcatactctttcacccacagcaccaatcctacctccatcgctaaccccactaaaacactcaccaagacctcaacccctgacccccatgcctcaggatactcctcaatagccatcgctgtagtatatccaaagacaaccatcattccccctaaataaattaaaaaaactattaaacccatataacctcccccaaaattcagaataataacacacccgaccacaccgctaacaatcaatactaaacccccataaataggagaaggcttagaagaaaaccccacaaaccccattactaaacccacactcaacagaaacaaagcatacatcattattctcgcacggactacaaccacgaccaatgatatgaaaaaccatcgttgtatttcaactacaagaacaccaatgaccccaatacgcaaaactaaccccctaataaaattaattaaccactcattcatcgacctccccaccccatccaacatctccgcatgatgaaacttcggctcactccttggcgcctgcctgatcctccaaatcaccacaggactattcctagccatgcactactcaccagacgcctcaaccgccttttcatcaatcgcccacatcactcgagacgtaaattatggctgaatcatccgctaccttcacgccaatggcgcctcaatattctttatctgcctcttcctacacatcgggcgaggcctatattacggatcatttctctactcagaaacctgaaacatcggcattatcctcctgcttgcaactatagcaacagccttcataggctatgtcctcccgtgaggccaaatatcattctgaggggccacagtaattacaaacttactatccgccatcccatacattgggacagacctagttcaatgaatctgaggaggctactcagtagacagtcccaccctcacacgattctttacctttcacttcatcttgcccttcattattgcagccctagcagcactccacctcctattcttgcacgaaacgggatcaaacaaccccctaggaatcacctcccattccgataaaatcaccttccacccttactacacaatcaaagacgccctcggcttacttctcttccttctctccttaatgacattaacactattctcaccagacctcctaggcgacccagacaattataccctagccaaccccttaaacacccctccccacatcaagcccgaatgatatttcctattcgcctacacaattctccgatccgtccctaacaaactaggaggcgtccttgccctattactatccatcctcatcctagcaataatccccatcctccatatatccaaacaacaaagcataatatttcgcccactaagccaatcactttattgactcctagccgcagacctcctcattctaacctgaatcggaggacaaccagtaagctacccttttaccatcattggacaagtagcatccgtactatacttcacaacaatcctaatcctaataccaactatctccctaattgaaaacaaaatactcaaatgggcctgtccttgtagtataaactaatacaccagtcttgtaaaccggagatgaaaacctttttccaaggacaaatcagagaaaaagtctttaactccaccattagcacccaaagctaagattctaatttaaactattctctgttctttcatggggaagcagatttgggtaccacccaagtattgactcacccatcaacaaccgctatgtatttcgtacattactgccagccaccatgaatattgtacggtaccataaatacttgaccacctgtagtacataaaaacccaatccacatcaaaaccccctccccatgcttacaagcaagtacagcaatcaaccctcaactatcacacatcaactgcaactccaaagccacccctcacccactaggataccaacaaacctacccacccttaacagtacatagtacataaagccatttaccgtacatagcacattacagtcaaatcccttctcatccccatggatgacccccctcagataggggtcccttgaccaccatcctccgtgaaatcaatatcccgcacaagagtgctactctcctcgctccgggcccataacacttgggggtagctaaagtgaactgtatccgacatctggttcctacttcagggccataaagcctaaatagcccacacgttccccttaaataagacatcacgatg

SEQ ID NO: 561 - DNA, 16568 bp, Homo sapiens mitochondrial
  3106: "n" refers to a nucleotide at position 3107 of the Cambridge Reference Sequence (CRS, Anderson et al. 1981 Nature 290:457-465), later determined to be absent from the human mtDNA sequence according to the revised CRS (rCRS, Andrews et al. 1999 Nature Genetics 23:147); "n" therefore represents a single nucleotide deletion at a position corresponding to nucleotide 3107 of SEQ ID NO:1 as provided herein.
gatcacaggtctatcaccctattaaccactcacgggagctctccatgcatttggtattttcgtctggggggtatgcacgcgatagcattgcgggccgctggagccggagcaccctatgtcgcagtatctgtctttgattcctgcctcatcccattatttatcgcacctacgttcaatattacagacgagcatacttactaaagtgtgttaattaattaatgcttgtaggacataacaataacaattaaatgtctgcacagccgctttccacacagacatcataacaaaaaatttccaccaaaccccccctcccccgccttctggccacagcacttaaacacatctctgccaaaccccaaaaacaaagaaccctaacaccagcctaaccagatttcaaattttatcttttggcggtatgcacttttaacagtcaccccccaactaacacattattttcccctcccactcccatactactaatctcatcaatacaacccccgcccatcctacccagcacacacaccgctgctaaccccataccccgaaccaaccaaaccccaaagacaccccccacagtttatgtagcttacctcctcaaagcaatacactgaaaatgtttagacgggctcacatcaccccataaacaaataggtttggtcctagcctttctattagctcttagtaagattacacatgcaagcatccccgttccagtgagttcaccctctaaatcaccacgatcaaaagggacaagcatcaagcacgcaacaatgcagctcaaaacgcttagcctagccacacccccacgggaaacagcagtgataaacctttagcaataaacgaaagtttaactaagctatactaaccccagggttggtcaatttcgtgccagccaccgcggtcacacgattaacccaagtcaatagaagccggcgtaaagagtgttttagatcaccccctccccaataaagctaaaactcacctgagttgtaaaaaactccagttgacacaaaataaactacgaaagtggctttaacatatctgaatacacaatagctaagacccaaactgggattagataccccactatgcttagccctaaacctcaacagttaaatcaacaaaactgctcgccagaacactacgagccacagcttaaaactcaaaggacctggcggtgcttcatatccctctagaggagcctgttctgtaatcgataaaccccgatcaacctcaccacctcttgctcagcctatataccgccatcttcagcaaaccctgatgaaggctacaaagtaagcgcaagtacccacgtaaagacgttaggtcaaggtgtagcccatgaggtggcaagaaatgggctacattttctaccccagaaaactacgatagcccttatgaaacttaagggtcgaaggtggatttagcagtaaactgagagtagagtgcttagttgaacagggccctgaagcgcgtacacaccgcccgtcaccctcctcaagtatacttcaaaggacatttaactaaaacccctacgcatttatatagaggagacaagtcgtaacatggtaagtgtactggaaagtgcacttggacgaaccagagtgtagcttaacacaaagcacccaacttacacttaggagatttcaacttaacttgaccgctctgagctaaacctagccccaaacccactccaccttactaccagacaaccttagccaaaccatttacccaaataaagtataggcgatagaaattgaaacctggcgcaatagatatagtaccgcaagggaaagatgaaaaattataaccaagcataatatagcaaggactaacccctataccttctgcataatgaattaactagaaataactttgcaaggagagccaaagctaagacccccgaaaccagacgagctacctaagaacagctaaaagagcacacccgtctatgtagcaaaatagtgggaagatttataggtagaggcgacaaacctaccgagcctggtgatagctggttgtccaagatagaatcttagttcaactttaaatttgcccacagaaccctctaaatccccttgtaaatttaactgttagtccaaagaggaacagctctttggacactaggaaaaaaccttgtagagagagtaaaaaatttaacacccatagtaggcctaaaagcagccaccaattaagaaagcgttcaagctcaacacccactacctaaaaaatcccaaacatatgactgaactcctcacacccaattggaccaatctatcaccctatagaagaactaatgttagtataagtaacatgaaaacattctcctccgcataagcctgcgtcagattaaaacactgaactgacaattaacagcccaatatctacaatcaaccaacaagtcattattaccctcactgtcaacccaacacaggcatgctcataaggaaaggttaaaaaaagtaaaaggaactcggcaaatcttaccccgcctgtttaccaaaaacatcacctctagcatcaccagtattagaggcaccgcctgcccagtgacacatgtttaacggccgcggtaccctaaccgtgcaaaggtagcataatcacttgttccttaaatagggacctgtatgaatggctccacgagggttcagctgtctcttacttttaaccagtgaaattgacctgcccgtgaagaggcgggcatgacacagcaagacgagaagaccctatggagctttaatttattaatgcaaacaatacctaacaaacccacaggtcctaaactaccaaacctgcattaaaaatttcggttggggcgacctcggagcagaacccaacctccgagcagtacatgctaagacttcaccagtcaaagcgaactaccatactcaattgatccaataacttgaccaacggaacaagttaccctagggataacagcgcaatcctattctagagtccatatcaacaatagggtttacgacctcgatgttggatcaggacatcccgatggtgcagccgctattaaaggttcgtttgttcaacgattaaagtcctacgtgatctgagttcagaccggagtaatccaggtcggtttctatctacnttcaaattcctccctgtacgaaaggacaagagaaataaggcctacttcacaaagcgccttcccccgtaaatgatatcatctcaacttagtattatacccacacccacccaagaacagggtttgttaagatggcagagcccggtaatcgcataaaacttaaaactttacagtcagaggttcaattcctcttcttaacaacatacccatggccaacctcctactcctcattgtacccattctaatcgcaatggcattcctaatgcttaccgaacgaaaaattctaggctatatacaactacgcaaaggccccaacgttgtaggcccctacgggctactacaacccttcgctgacgccataaaactcttcaccaaagagcccctaaaacccgccacatctaccatcaccctatacatcaccgccccgaccttagctctcaccatcgctcttctactatgaacccccctccccatacccaaccccctggttaacctcaacctaggcctcctatttattctagccacctctagcctagccgtttactcaatcctctgatcagggtgagcatcaaactcaaactacgccctgatcggcgcactgcgagcagtagcccaaacaatctcatatgaagtcaccctagccatcattctactatcaacattactaataagtggctcctttaacctctccacccttatcacaacacaagaacacctctgattactcctgccatcatgacccttggccataatatgatttatctccacactagcagagaccaaccgaacccccttcgaccttgccgaaggggagtccgaactagtctcaggcttcaacatcgaatacgccgcaggccccttcgccctattcttcatagccgaatacacaaacattattataataaacaccctcaccactacaatcttcctaggaacaacatatgacgcactctcccctgaactctacacaacatattttgtcaccaagaccctacttctgacctccctgttcttatgaattcgaacagcatacccccgattccgctacgaccaactcatacacctcctatgaaaaaacttcctaccactcaccctagcattacttatatgatatgtctccatacccattacaatctccagcattccccctcaaacctaagaaatatgtctgataaaagagttactttgatagagtaaataataggagtttaaacccccttatttctaggactatgagaatcgaacccatccctgagaatccaaaattctccgtgccacctatcacaccccatcctaaagtaaggtcagctaaataagctatcgggcccataccccgaaaatgttggttatacccttcccgtactaattaatcccctggcccaacccgtcatctactctaccatctttgcaggcacactcatcacagcgctaagctcgcactgattttttacctgagtaggcctagaaataaacatgctagcctttattccagttctaaccaaaaaaataaaccctcgttccacagaagctgccatcaagtatttcctcacgcaagcaaccgcatccataatccttctaatagctatcctcttcaacaatatactctccggacaatgaaccataaccaatactaccaatcaatactcatcattaataatcataatggctatagcaataaaactaggaatagccccctttcacttctgagtcccagaggttacccaaggcacccctctgacatccggcctgcttcttctcacatgacaaaaactagcccccatctcaatcatataccaaatctctccctcactaaacgtaagccttctcctcactctctcaatcttatccatcatagcaggcagttgaggtggattaaaccaaacccagctacgcaaaatcttagcatactcctcaattacccacataggatgaataatagcagttctaccgtacaaccctaacataaccattcttaatttaactatttatatcatcctaactactaccgcattcctactactcaacttaaactccagcaccacgaccctactactatctcgcacctgaaacaagctaacatgactaacacccttaattccatccaccctcctctccctaggaggcctacccccgctaaccggctttttgcccaaatgggccattatcgaagaattcacaaaaaacaatagcctcatcatccccaccatcatagccaccatcaccctccttaacctctacttctacctacgcctaatctactccacctcaatcacactactccccatatctaacaacgtaaaaataaaatgacagtttgaacatacaaaacccaccccactcctccccacactcatcacccttaccacgctactcctacctatctccccttttatactaataatcttatagaaatttaggttaaatacagaccaagagccttcaaagccctcagtaagttacaatacttaatttctgtaacagctaaggactgcaaaacctcactctgcatcaactgaacgcaaatcagccactttaattaagctaagcccttactagaccaatgggacttaaacccacaaacacttagttaacagctaagcaccctaatcaactggcttcaatctacttctcccgccgccgggaaaaaaggcgggagaagccccggcaggtttgaagctgcttcttcgaatttgcaattcaatatgaaaatcacctcggagctggtaaaaagaggcctaacccctgtctttagatttacagtccaatgcttcactcagccattttacctcacccccactgatgttcgtcgaccgttgactattctctacaaaccacaaagacattggaacactatacctattattcggcgcatgagctggagtcctaggcacagctctaagcctccttattcgagccgagctgggccagccaggcaaccttctaggtaacgaccacatctacaacgttatcgtcacagcccatgcatttgtaataatcttcttcatagtaatacccatcataatcggaggctttggcaactgactagttcccctaataatcggtgcccccgatatggcgttcccccgcataaacaacataagcttctgactcttacctccctctctcctactcctgctcgcatctgctatagtggaggccggagcaggaacaggttgaacagtctaccctcccttagcagggaactactcccaccctggagcctccgtagacctaaccatcttctccttacacctagcaggtgtctcctctatcttaggggccatcaatttcatcacaacaattatcaatataaaaccccctgccataacccaataccaaacgcccctcttcgtctgatccgtcctaatcacagcagtcctacttctcctatctctcccagtcctagctgctggcatcactatactactaacagaccgcaacctcaacaccaccttcttcgaccccgccggaggaggagaccccattctataccaacacctattctgatttttcggtcaccctgaagtttatattcttatcctaccaggcttcggaataatctcccatattgtaacttactactccggaaaaaaagaaccatttggatacataggtatggtctgagctatgatatcaattggcttcctagggtttatcgtgtgagcacaccatatatttacagtaggaatagacgtagacacacgagcatatttcacctccgctaccataatcatcgctatccccaccggcgtcaaagtatttagctgactcgccacactccacggaagcaatatgaaatgatctgctgcagtgctctgagccctaggattcatctttcttttcaccgtaggtggcctgactggcattgtattagcaaactcatcactagacatcgtactacacgacacgtactacgttgtagctcacttccactatgtcctatcaataggagctgtatttgccatcataggaggcttcattcactgatttcccctattctcaggctacaccctagaccaaacctacgccaaaatccatttcgctatcatattcatcggcgtaaatctaactttcttcccacaacactttctcggcctatccggaatgccccgacgttactcggactaccccgatgcatacaccacatgaaatatcctatcatctgtaggctcattcatttctctaacagcagtaatattaataattttcatgatttgagaagccttcgcttcgaagcgaaaagtcctaatagtagaagaaccctccataaacctggagtgactatatggatgccccccaccctaccacacattcgaagaacccgtatacataaaatctagacaaaaaaggaaggaatcgaaccccccaaagctggtttcaagccaaccccatggcctccatgactttttcaaaaagatattagaaaaaccatttcataactttgtcaaagttaaattataggctaaatcctatatatcttaatggcacatgcagcgcaagtaggtctacaagacgctacttcccctatcatagaagagcttatcacctttcatgatcacgccctcataatcattttccttatctgcttcctagtcctgtatgcccttttcctaacactcacaacaaaactaactaatactaacatctcagacgctcaggaaatagaaaccgtctgaactatcctgcccgccatcatcctagtcctcatcgccctcccatccctacgcatcctttacataacagacgaggtcaacgatccctcccttaccatcaaatcaattggccaccaatggtactgaacctacgagtacaccgactacggcggactaatcttcaactcctacatacttcccccattattcctagaaccaggcgacctgcgactccttgacgttgacaatcgagtagtactcccgattgaagcccccattcgtataataattacatcacaagacgtcttgcactcatgagctgtccccacattaggcttaaaaacagatgcaattcccggacgtctaaaccaaaccactttcaccgctacacgaccgggggtatactacggtcaatgctctgaaatctgtggagcaaaccacagtttcatgcccatcgtcctagaattaattcccctaaaaatctttgaaatagggcccgtatttaccctatagcaccccctctaccccctctagagcccactgtaaagctaacttagcattaaccttttaagttaaagattaagagaaccaacacctctttacagtgaaatgccccaactaaatactaccgtatggcccaccataattacccccatactccttacactatttctcatcacccaactaaaaatattaaacacaaactaccacttacctccctcaccaaagcccataaaaataaaaaattataacaaaccctgagaaccaaaatgaacgaaaatctgttcgcttcattcattgcccccacagtcctaggcctacccgccgcagtactgatcattctatttccccctctattgatccccacctccaaatatctcatcaacaaccgactaattaccacccaacaatgactaatcaaactaacctcaaaacaaatgatagccatacacaacactaaaggacgaacctgatctcttatactagtatccttaatcatttttattgccacaactaacctcctcggactcctgcctcactcatttacaccaaccacccaactatctataaacctagccatggccatccccttatgagcgggcgcagtgattataggctttcgctctaagattaaaaatgccctagcccacttcttaccacaaggcacacctacaccccttatccccatactagttattatcgaaaccatcagcctactcattcaaccaatagccctggccgtacgcctaaccgctaacattactgcaggccacctactcatgcatctaattggaagcgccaccctagcaatatcaaccattaaccttccctctacacttatcatcttcacaattctaattctactgactatcctagaaatcgctgtcgccttaatccaagcctacgttttcacacttctagtaagcctctacctgcacgacaacacataatgacccaccaatcacatgcctatcatatagtaaaacccagcccatgacccctaacaggggccctctcagccctcctaatgacctccggcctagccatgtgatttcacttccactccataacgctcctcatactaggcctgctaaccaacacactaaccatataccaatgatggcgcgatgtaacacgagaaagcacataccaaggccaccacacaccacctgtccaaaaaggccttcgatacgggataatcctatttattacctcagaagtttttttcttcgcaggatttttctgagccttttaccactccagcctagcccctaccccccaactaggagggcactggcccccaacaggcatcaccccgctaaatcccctagaagtcccactcctaaacacatccgtattactcgcatcaggagtatcaatcacctgagctcaccatagtctaatagaaaacaaccgaaaccaaataattcaagcactgcttattacaattttactgggtctctattttaccctcctacaagcctcagagtacttcgaatctcccttcaccatttccgacggcatctacggctcaacattttttgtagccacaggcttccatggacttcacgtcattattggctcaactttcctcactatctgcttcatccgccaactaatatttcactttacatccaaacatcactttggcttcgaagccgccgcctgatactggcattttgtagatgtggtttgactatttctgtatgtctccatctattgatgagggtcttactcttttagtataaatagtaccgttaacttccaattaactagttttgacaacattcaaaaaagagtaataaacttcgccttaattttaataatcaacaccctcctagccttactactaataattattacattttgactaccacaactcaacggctacatagaaaaatccaccccttacgagtgcggcttcgaccctatatcccccgcccgcgtccctttctccataaaattcttcttagtagctattaccttcttattatttgatctagaaattgccctccttttacccctaccatgagccctacaaacaactaacctgccactaatagttatgtcatccctcttattaatcatcatcctagccctaagtctggcctatgagtgactacaaaaaggattagactgagccgaattggtatatagtttaaacaaaacgaatgatttcgactcattaaattatgataatcatatttaccaaatgcccctcatttacataaatattatactagcatttaccatctcacttctaggaatactagtatatcgctcacacctcatatcctccctactatgcctagaaggaataatactatcgctattcattatagctactctcataaccctcaacacccactccctcttagccaatattgtgcctattgccatactagtttttgccgcctgcgaagcagcggtaggcctagccctactagtctcaatctccaacacatatggcctagactacgtacataacctaaacctactccaatgctaaaactaatcgtcccaacaattatattactaccactgacatgactctccaaaaaacacataatttgaatcaacacaaccacccacagcctaattattagcatcatccccctactattttttaaccaaatcaacaacaacctatttagctgctccccaaccttttcctccgaccccctaacaacccccctcctaatactaactacctgactcctacccctcacaatcatggcaagccaacgccacttatccagtgaaccactatcacgaaaaaaactctacctctctatactaatctccctacaaatctccttaattataacattcacagccacagaactaatcatattttatatcttcttcgaaaccacacttatccccaccttggctatcatcacccgatgaggcaaccaaccagaacgcctgaacgcaggcacatacttcctattctacaccctagtaggctcccttcccctactcatcgcactaatttacactcacaacaccctaggctcactaaacattctactactcactctcactgcccaagaactatcaaactcctgagccaacaacttaatatgactagcttacacaatagcttttatagtaaagatacctctttacggactccacttatgactccctaaagcccatgtcgaagcccccatcgctgggtcaatagtacttgccgcagtactcttaaaactaggcggctatggtataatacgcctcacactcattctcaaccccctgacaaaacacatagcctaccccttccttgtactatccctatgaggcataattataacaagctccatctgcctacgacaaacagacctaaaatcgctcattgcatactcttcaatcagccacatggccctcgtagtaacagccattctcatccaaaccccctgaagcttcaccggcgcagtcattctcataatcgcccacggacttacatcctcattactattctgcctagcaaactcaaactacgaacgcactcacagtcgcatcataatcctctctcaaggacttcaaactctgctcccactaatagctttttgatgacttctagcaagcctcgctaacctcgccttaccccccactattaacctactgggagaactctctgtgctagtaaccacattctcctgatcaaatatcactctcctacttacaggactcaacatactagtcacagccctatactccctctacatatttaccacaacacaatgaggctcactcacccaccacattaacaacataaaaccctcattcacacgagaaaacaccctcatgttcatacacctatcccccattctcctcctatccctcaaccccgacatcattaccgggttttcctcttgtaaatatagtttaaccaaaacatcagattgtgaatctgacaacagaggcttacgaccccttatttaccgagaaagctcacaagaactgctaactcatgcccccatgtctaacaacatggctttctcaacttttaaaggataacagctatccattggtcttaggccccaaaaattttggtgcaactccaaataaaagtaataaccatgcacactactataaccaccctaaccctgacttccctaattccccccatccttaccaccctcgttaaccctaacaaaaaaaactcatacccccattatgtaaaatccattgtcgcatccacctttattatcagtctcttccccacaacaatattcatgtgcctagaccaagaagttattatctcgaactgacactgagccacaacccaaacaacccagctctccctaagcttcaaactagactacttctccataatattcatccctgtagcattgttcgttacatggtccatcatagaattctcactgtgatatataaactcagacccaaacattaatcagttcttcaaatatctactcattttcctaattaccatgctaatcttagttaccgctaacaacctattccaactgttcatcggctgagagggcgtaggaattatatccttcttgctcatcagttgatgatacgcccgagcagatgccaacacagcagccattcaagcaatcctatacaaccgtatcggcgatatcggtttcatcctcgccttagcatgatttatcctacactccaactcatgagacccacaacaaatagcccttctaaacgctaatccaagcctcaccccactactaggcctcctcctagcagcagcaggcaaatcagcccaattaggtctccacccctgactcccctcagccatagaaggccccaccccagtctcagccctactccactcaagcactatagttgtagcaggagtcttcttactcatccgcttccaccccctagcagaaaatagcccactaatccaaactctaacactatgcttaggcgctatcaccactctgttcgcagcagtctgcgcccttacacaaaatgacatcaaaaaaatcgtagccttctccacttcaagtcaactaggactcatagtagttacaatcggcatcaaccaaccacacctagcattcctgcacatctgtacccacgccttcttcaaagccatactatttatgtgctccgggtccatcatccacaaccttaacaatgaacaagatattcgaaaaataggaggactactcaaaaccatacctctcacttcaacctccctcaccattggcagcctagcattagcaggaatacctttcctcacaggtttctattccaaagaccacatcatcgaaaccgcaaacatatcatacacaaacgcctgagccctatctattactctcatcgctacctccctgacaagcgcctatagcactcgaataattcttctcaccctaacaggtcaacctcgcttccctacccttactaacattaacgaaaataaccccaccctactaaaccccattaaacgcctggcagccggaagcctattcgcaggatttctcattactaacaacatttcccccgcatcccccttccaaacaacaatccccctctacctaaaactcacagccctcgctgtcactttcctaggacttctaacagccctagacctcaactacctaaccaacaaacttaaaataaaatccccactatgcacattttatttctccaacatactcggattctaccctagcatcacacaccgcacaatcccctatctaggccttcttacgagccaaaacctgcccctactcctcctagacctaacctggctagaaaagctattacctaaaacaatttcacagcaccaaatctccacctccatcatcacctcaacccaaaaaggcataattaaactttacttcctctccttcttcttcccactcatcctaaccctactcctaatcacataacctattcccccgagcaatctcaattacaatatatacaccaacaaacaatgttcaaccagtaactactactaatcaacgcccataatcatacaaagcccccgcaccaataggatcctcccgaatcaaccctgacccctctccttcataaattattcagctccctacactattaaagtttaccacaaccaccaccccatcatactctttcacccacagcaccaatcctacctccatcgctaaccccactaaaacactcaccaagacctcaacccctgacccccatgcctcaggatactcctcaatagccatcgctgtagtatatccaaagacaaccatcattccccctaaataaattaaaaaaactattaaacccatataacctcccccaaaattcagaataataacacacccgaccacaccgctaacaatcaatactaaacccccataaataggagaaggcttagaagaaaaccccacaaaccccattactaaacccacactcaacagaaacaaagcatacatcattattctcgcacggactacaaccacgaccaatgatatgaaaaaccatcgttgtatttcaactacaagaacaccaatgaccccaatacgcaaaattaaccccctaataaaattaattaaccactcattcatcgacctccccaccccatccaacatctccgcatgatgaaacttcggctcactccttggcgcctgcctgatcctccaaatcaccacaggactattcctagccatgcactactcaccagacgcctcaaccgccttttcatcaatcgcccacatcactcgagacgtaaattatggctgaatcatccgctaccttcacgccaatggcgcctcaatattctttatctgcctcttcctacacatcgggcgaggcctatattacggatcatttctctactcagaaacctgaaacatcggcattaccctcctgcttgcaactatagcaacagccttcataggttatgtcctcccgtgaggccaaatatcattctgaggggccacagtaattacaaacttactatccgccatcccatacattgggacagacctagttcaatgaatctgaggaggctactcagtagacagtcccaccctcacacgattctttacctttcacttcatcttgcccttcattattgcagccctagcagcactccacctcctattcttgcacgaaacgggatcaaacaaccccctaggaatcacctcccattccgataaaatcaccttccacccttactacacaatcaaagacaccctcggcttacttctcttccttctctccttaatgacattaacactattctcaccagacctcctaggcgacccagacaattataccctagccaaccccttaaacacccctccccacatcaagcccgaatgatatttcctattcgcctacacaattctccgatccgtccctaacaaactaggaggcgtccttgccctattactatccatcctcatcctagcaataatccccatcctccatatatccaaacaacaaagcataatatttcgcccactaagccaatcactttattgactcctagccgcagacctcctcattctaacctgaatcggaggacaaccagtaagctacccttttaccatcattggacaagtagcatccgtactatacttcacaacaatcctaatcctaataccaactatctccctaattgaaaacaaaatactcaaatgggcctgtccttgtagtataaactaatacaccagtcttgtaaaccggagatgaaaacctttttccaaggacaaatcagagaaaaagtctttaactccaccattagcacccaaagctaagattctaatttaaactattctctgttctttcatggggaagcagatttgggtaccacccaagtattgactcacccatcaacaaccgctatgtatctcgtacattactgccagccaccatgaatattgtacagtaccataaatacttgactacctgtagtacataaaaactcaacccacatcaaaaccctgcccccatgcttacaagcaagtacagcaatcaaccttcaactgtcacacatcaactgcaactccaaagccacccctcacccactaggatatcaacaaacctacccgcccttaacagtacatagcacataaagtcatttaccgtacatagcacattacagtcaaatcccttctcgtccccatggatgacccccctcagataggggtcccttgaccaccatcctccgtgaaatcaatatcccgcacaagagtgctactctcctcgctccgggcccataacacttgggggtagctaaagtgaactgtatccgacatctggttcctacttcagggtcataaagcctaaatagcccacacgttccccttaaataagacatcacgatg

SEQ ID NO: 562 - DNA, 24 bp, Artificial Sequence
  Primer
caactatcacacatcaactgcaac

SEQ ID NO: 563 - DNA, 21 bp, Artificial Sequence
  Primer
tcgcctgtaatattgaacgta

SEQ ID NO: 564 - DNA, 23 bp, Artificial Sequence
  Primer
gctaaagtgaactgtatccgaca

SEQ ID NO: 565 - DNA, 21 bp, Artificial Sequence
  Primer
gactgttaaaagtgcataccg

SEQ ID NO: 566 - DNA, 21 bp, Artificial Sequence
  Primer
tatttatcgcacctacgttca

SEQ ID NO: 567 - DNA, 18 bp, Artificial Sequence
  Primer
aactgtggggggtgtctt

SEQ ID NO: 568 - DNA, 23 bp, Artificial Sequence
  Primer
gacatgataacaaaaaatttcca

SEQ ID NO: 569 - DNA, 18 bp, Artificial Sequence
  Primer
gtgtggctaggctaagcg

SEQ ID NO: 570 - DNA, 16 bp, Artificial Sequence
  Primer
cgcccatcctacccag

SEQ ID NO: 571 - DNA, 25 bp, Artificial Sequence
  Primer
tcttagctattgtgtgttcagatat

SEQ ID NO: 572 - DNA, 19 bp, Artificial Sequence
  Primer
tgcagctcaaaacgcttag

SEQ ID NO: 573 - DNA, 18 bp, Artificial Sequence
  Primer
cgtgggtacttgcgctta

SEQ ID NO: 574 - DNA, 24 bp, Artificial Sequence
  Primer
gctttaacatatctgaacacacaa

SEQ ID NO: 575 - DNA, 24 bp, Artificial Sequence
  Primer
cttgtctcctctatataaatgcgt

SEQ ID NO: 576 - DNA, 20 bp, Artificial Sequence
  Primer
gaaggctacaaagtaagcgc

SEQ ID NO: 577 - DNA, 17 bp, Artificial Sequence
  Primer
tcatctttcccttgcgg

SEQ ID NO: 578 - DNA, 24 bp, Artificial Sequence
  Primer
tacgcatttatatagaggagacaa

SEQ ID NO: 579 - DNA, 18 bp, Artificial Sequence
  Primer
atcaccaggctcggtagg

SEQ ID NO: 580 - DNA, 19 bp, Artificial Sequence
  Primer
tagtaccgcaagggaaaga

SEQ ID NO: 581 - DNA, 19 bp, Artificial Sequence
  Primer
gttgagcttgaacgctttc

SEQ ID NO: 582 - DNA, 17 bp, Artificial Sequence
  Primer
aggcgacaaacctaccg

SEQ ID NO: 583 - DNA, 23 bp, Artificial Sequence
  Primer
gtgagggtaataatgacttgttg

SEQ ID NO: 584 - DNA, 21 bp, Artificial Sequence
  Primer
ccatagtaggcctaaaagcag

SEQ ID NO: 585 - DNA, 22 bp, Artificial Sequence
  Primer
agtgattatgctacctttgcac

SEQ ID NO: 586 - DNA, 24 bp, Artificial Sequence
  Primer
caatatctacaarcaaccaacaag

SEQ ID NO: 587 - DNA, 20 bp, Artificial Sequence
  Primer
accgaaatttttaatgcagg

SEQ ID NO: 588 - DNA, 19 bp, Artificial Sequence
  Primer
taaccgtgcaaaggtagca

SEQ ID NO: 589 - DNA, 18 bp, Artificial Sequence
  Primer
cctgatccaacatcgagg

SEQ ID NO: 590 - DNA, 21 bp, Artificial Sequence
  Primer
cctaaactaccaaacctgcat

SEQ ID NO: 591 - DNA, 19 bp, Artificial Sequence
  Primer
gccatcttaacaaacctgt

SEQ ID NO: 592 - DNA, 19 bp, Artificial Sequence
  Primer
agggtttacgacctcgatg

SEQ ID NO: 593 - DNA, 17 bp, Artificial Sequence
  Primer
ggtagatgtggcgggtt

SEQ ID NO: 594 - DNA, 19 bp, Artificial Sequence
  Primer
ttgttaagatggcagagcc

SEQ ID NO: 595 - DNA, 20 bp, Artificial Sequence
  Primer
aatgatggctagggtgactt

SEQ ID NO: 596 - DNA, 16 bp, Artificial Sequence
  Primer
agcccctaaaacccgc

SEQ ID NO: 597 - DNA, 22 bp, Artificial Sequence
  Primer
ataatgtttgtgtattcggcta

SEQ ID NO: 598 - DNA, 23 bp, Artificial Sequence
  Primer
caaacaatctcatatgaagtcac

SEQ ID NO: 599 - DNA, 17 bp, Artificial Sequence
  Primer
agggggaatgctggaga

SEQ ID NO: 600 - DNA, 19 bp, Artificial Sequence
  Primer
gccctattcttcatagccg

SEQ ID NO: 601 - DNA, 15 bp, Artificial Sequence
  Primer
atgacgggttgggcc

SEQ ID NO: 602 - DNA, 21 bp, Artificial Sequence
  Primer
catacccattacaatctccag

SEQ ID NO: 603 - DNA, 26 bp, Artificial Sequence
  Primer
tattaatgatgagtattgattggtag

SEQ ID NO: 604 - DNA, 15 bp, Artificial Sequence
  Primer
ggcccaacccgtcat

SEQ ID NO: 605 - DNA, 20 bp, Artificial Sequence
  Primer
gctaagattttgcgtagctg

SEQ ID NO: 606 - DNA, 23 bp, Artificial Sequence
  Primer
cctcttcaacaatatactctccg

SEQ ID NO: 607 - DNA, 16 bp, Artificial Sequence
  Primer
ggcaaaaagccggtta

SEQ ID NO: 608 - DNA, 18 bp, Artificial Sequence
  Primer
aaaccagacccagctacg

SEQ ID NO: 609 - DNA, 25 bp, Artificial Sequence
  Primer
aagattattagtataaaaggggaga

SEQ ID NO: 610 - DNA, 15 bp, Artificial Sequence
  Primer
cccgctaaccggctt

SEQ ID NO: 611 - DNA, 22 bp, Artificial Sequence
  Primer
gagaagtagattgaagccagtt

SEQ ID NO: 612 - DNA, 17 bp, Artificial Sequence
  Primer
tcatcgcccttaccacg

SEQ ID NO: 613 - DNA, 19 bp, Artificial Sequence
  Primer
aggaggcttagagctgtgc

SEQ ID NO: 614 - DNA, 20 bp, Artificial Sequence
  Primer
taagcaccctaatcaactgg

SEQ ID NO: 615 - DNA, 20 bp, Artificial Sequence
  Primer
cctccactatagcagatgcg

SEQ ID NO: 616 - DNA, 21 bp, Artificial Sequence
  Primer
cagctctaagcctccttattc

SEQ ID NO: 617 - DNA, 21 bp, Artificial Sequence
  Primer
cagctaggactgggagagata

SEQ ID NO: 618 - DNA, 19 bp, Artificial Sequence
  Primer
cctactcctgctcgcatct

SEQ ID NO: 619 - DNA, 21 bp, Artificial Sequence
  Primer
tatggtgtgctcacacgataa

SEQ ID NO: 620 - DNA, 24 bp, Artificial Sequence
  Primer
agcagtcctacttctcctatctct

SEQ ID NO: 621 - DNA, 25 bp, Artificial Sequence
  Primer
gtcgtgtagtacgatgtctagtgat

SEQ ID NO: 622 - DNA, 23 bp, Artificial Sequence
  Primer
cataggtatggtctgagctatga

SEQ ID NO: 623 - DNA, 18 bp, Artificial Sequence
  Primer
ggtgtatgcatcggggta

SEQ ID NO: 624 - DNA, 24 bp, Artificial Sequence
  Primer
caaactcatcactagacatcgtac

SEQ ID NO: 625 - DNA, 17 bp, Artificial Sequence
  Primer
atggggttggcttgaaa

SEQ ID NO: 626 - DNA, 16 bp, Artificial Sequence
  Primer
cggactaccccgatgc

SEQ ID NO: 627 - DNA, 20 bp, Artificial Sequence
  Primer
cctgagcgtctgagatgtta

SEQ ID NO: 628 - DNA, 18 bp, Artificial Sequence
  Primer
cccaaagctggtttcaag

SEQ ID NO: 629 - DNA, 18 bp, Artificial Sequence
  Primer
gtcaaggagtcgcaggtc

SEQ ID NO: 630 - DNA, 20 bp, Artificial Sequence
  Primer
cttcctagtcctgtatgccc

SEQ ID NO: 631 - DNA, 18 bp, Artificial Sequence
  Primer
gggtaaatacgggcccta

SEQ ID NO: 632 - DNA, 16 bp, Artificial Sequence
  Primer
aggcgacctgcgactc

SEQ ID NO: 633 - DNA, 21 bp, Artificial Sequence
  Primer
tttatttttatgggctttggt

SEQ ID NO: 634 - DNA, 22 bp, Artificial Sequence
  Primer
attcccctaaaaatctttgaaa

SEQ ID NO: 635 - DNA, 25 bp, Artificial Sequence
  Primer
gcaataaaaatgattaaggatacta

SEQ ID NO: 636 - DNA, 24 bp, Artificial Sequence
  Primer
aaaattataacaaaccctgagaac

SEQ ID NO: 637 - DNA, 16 bp, Artificial Sequence
  Primer
gcggttaggcgtacgg

SEQ ID NO: 638 - DNA, 26 bp, Artificial Sequence
  Primer
cgaacctgatctcttatactagtatc

SEQ ID NO: 639 - DNA, 18 bp, Artificial Sequence
  Primer
tcatgggctgggttttac

SEQ ID NO: 640 - DNA, 18 bp, Artificial Sequence
  Primer
ttcaaccaatagccctgg

SEQ ID NO: 641 - DNA, 19 bp, Artificial Sequence
  Primer
cagaaaaatcctgcgaaga

SEQ ID NO: 642 - DNA, 22 bp, Artificial Sequence
  Primer
atcatatagtaaaacccagccc

SEQ ID NO: 643 - DNA, 21 bp, Artificial Sequence
  Primer
tcgaagtactctgaggcttgt

SEQ ID NO: 644 - DNA, 21 bp, Artificial Sequence
  Primer
ctcagaagtttttttcttcgc

SEQ ID NO: 645 - DNA, 25 bp, Artificial Sequence
  Primer
agttaattggaagttaacggtacta

SEQ ID NO: 646 - DNA, 22 bp, Artificial Sequence
  Primer
ctacaagcctcagagtacttcg

SEQ ID NO: 647 - DNA, 21 bp, Artificial Sequence
  Primer
ggagggcaatttctagatcaa

SEQ ID NO: 648 - DNA, 24 bp, Artificial Sequence
  Primer
attgatgagggtcttactctttta

SEQ ID NO: 649 - DNA, 23 bp, Artificial Sequence
  Primer
ctagaagtgagatggtaaatgct

SEQ ID NO: 650 - DNA, 26 bp, Artificial Sequence
  Primer
ttctccataaaattcttcttagtagc

SEQ ID NO: 651 - DNA, 26 bp, Artificial Sequence
  Primer
agtaggtttaggttatgtacgtagtc

SEQ ID NO: 652 - DNA, 24 bp, Artificial Sequence
  Primer
atgataatcatatttaccaaatgc

SEQ ID NO: 653 - DNA, 18 bp, Artificial Sequence
  Primer
gttggcttgccatgattg

SEQ ID NO: 654 - DNA, 23 bp, Artificial Sequence
  Primer
acatatggcctagactacgtaca

SEQ ID NO: 655 - DNA, 18 bp, Artificial Sequence
  Primer
gcgatgagtaggggaagg

SEQ ID NO: 656 - DNA, 17 bp, Artificial Sequence
  Primer
cccctcacaatcatggc

SEQ ID NO: 657 - DNA, 22 bp, Artificial Sequence
  Primer
agtgtgaggcgtattataccat

SEQ ID NO: 658 - DNA, 20 bp, Artificial Sequence
  Primer
tacaccctagtaggctccct

SEQ ID NO: 659 - DNA, 21 bp, Artificial Sequence
  Primer
tttgagtttgctaggcagaat

SEQ ID NO: 660 - DNA, 20 bp, Artificial Sequence
  Primer
ggcggctatggtataatacg

SEQ ID NO: 661 - DNA, 24 bp, Artificial Sequence
  Primer
ccattgtgttgtggtaaatatgta

SEQ ID NO: 662 - DNA, 24 bp, Artificial Sequence
  Primer
ttacatcctcattactattctgcc

SEQ ID NO: 663 - DNA, 18 bp, Artificial Sequence
  Primer
ttagacatgggggcatga

SEQ ID NO: 664 - DNA, 23 bp, Artificial Sequence
  Primer
agccctatactccctctacatat

SEQ ID NO: 665 - DNA, 25 bp, Artificial Sequence
  Primer
ttcgagataataacttcttggtcta

SEQ ID NO: 666 - DNA, 22 bp, Artificial Sequence
  Primer
gctcacaagaactgctaactca

SEQ ID NO: 667 - DNA, 22 bp, Artificial Sequence
  Primer
gaataggttgttagcggtaact

SEQ ID NO: 668 - DNA, 24 bp, Artificial Sequence
  Primer
catccacctttattatcagtctct

SEQ ID NO: 669 - DNA, 17 bp, Artificial Sequence
  Primer
atttgcctgctgctgct

SEQ ID NO: 670 - DNA, 25 bp, Artificial Sequence
  Primer
taccatactaatcttagttaccgct

SEQ ID NO: 671 - DNA, 21 bp, Artificial Sequence
  Primer
agtggagaaggctacgatttt

SEQ ID NO: 672 - DNA, 17 bp, Artificial Sequence
  Primer
ggcctcctcctagcagc

SEQ ID NO: 673 - DNA, 21 bp, Artificial Sequence
  Primer
acctgtgaggaaaggtattcc

SEQ ID NO: 674 - DNA, 21 bp, Artificial Sequence
  Primer
gacatcaaaaaaatcgtagcc

SEQ ID NO: 675 - DNA, 25 bp, Artificial Sequence
  Primer
aaatgttgttagtaatgagaaatcc

SEQ ID NO: 676 - DNA, 21 bp, Artificial Sequence
  Primer
cattagcaggaatacctttcc

SEQ ID NO: 677 - DNA, 19 bp, Artificial Sequence
  Primer
ctaggaggagtaggggcag

SEQ ID NO: 678 - DNA, 21 bp, Artificial Sequence
  Primer
ctattcgcaggatttctcatt

SEQ ID NO: 679 - DNA, 16 bp, Artificial Sequence
  Primer
gtgcgggggctttgta

SEQ ID NO: 680 - DNA, 19 bp, Artificial Sequence
  Primer
cgcacaatcccctatctag

SEQ ID NO: 681 - DNA, 22 bp, Artificial Sequence
  Primer
ttaatttatttagggggaatga

SEQ ID NO: 682 - DNA, 22 bp, Artificial Sequence
  Primer
aactactactaatcaacgccca

SEQ ID NO: 683 - DNA, 22 bp, Artificial Sequence
  Primer
ggtcattggtgttcttgtagtt

SEQ ID NO: 684 - DNA, 20 bp, Artificial Sequence
  Primer
ccaaagacaaccatcattcc

SEQ ID NO: 685 - DNA, 18 bp, Artificial Sequence
  Primer
cgtgaaggtagcggatga

SEQ ID NO: 686 - DNA, 23 bp, Artificial Sequence
  Primer
accatcgttgtatttcaactaca

SEQ ID NO: 687 - DNA, 21 bp, Artificial Sequence
  Primer
tagcctcctcagattcattga

SEQ ID NO: 688 - DNA, 22 bp, Artificial Sequence
  Primer
acgtaaattatggctgaatcat

SEQ ID NO: 689 - DNA, 20 bp, Artificial Sequence
  Primer
cctaggaggtctggtgagaa

SEQ ID NO: 690 - DNA, 22 bp, Artificial Sequence
  Primer
cctagttcaatgaatctgagga

SEQ ID NO: 691 - DNA, 17 bp, Artificial Sequence
  Primer
aatgaggaggtctgcgg

SEQ ID NO: 692 - DNA, 24 bp, Artificial Sequence
  Primer
ttccttctctccttaatgacatta

SEQ ID NO: 693 - DNA, 20 bp, Artificial Sequence
  Primer
tagctttgggtgctaatggt

SEQ ID NO: 694 - DNA, 18 bp, Artificial Sequence
  Primer
gactcctagccgcagacc

SEQ ID NO: 695 - DNA, 20 bp, Artificial Sequence
  Primer
ggagttgcagttgatgtgtg

SEQ ID NO: 696 - DNA, 22 bp, Artificial Sequence
  Primer
tctttaactccaccattagcac

SEQ ID NO: 697 - DNA, 24 bp, Artificial Sequence
  Primer
ggaaccagatgtcggatacagttc
